(19) United States
(12) Patent Application Publication
(10) Pub. No.: US 2003/0148295 A1
(43) Pub. Date: Aug. 7, 2003

(54) Expression profiles and methods of use

(76) Inventors: Jackson Shek-Lam Wan, San Diego, CA (US); Yixin Wang, San Diego, CA (US)

Correspondence Address: PRESTON GATES ELLIS & ROUVELAS MEEDS LLP, 1735 NEW YORK AVENUE, NW, SUITE 500, WASHINGTON, DC, 20006, US

(21) Appl. No.: 10/101,510

(22) Filed: Mar. 20, 2002

Related U.S. Application Data
(60) Provisional application No. 60/276,947, filed on Mar. 20, 2001.

(51) Int. Cl. C12Q 1/68; C07H 21/04; C12N 9/00; C12P 21/02; C12N 5/06

(52) U.S. Cl. 435/6; 435/69.1; 435/183; 435/320.1; 435/325; 536/23.2

(57) ABSTRACT

The present invention relates to gene expression profiles, algorithms to generate gene expression profiles, microarrays comprising nucleic acid sequences representing gene expression profiles, methods of using gene expression profiles and microarrays, and business methods directed to the use of gene expression profiles, microarrays, and algorithms. The present invention further relates to protein expression profiles, algorithms to generate protein expression profiles, microarrays comprising protein-capture agents that bind proteins comprising protein expression profiles, methods of using protein expression profiles and microarrays, and business methods directed to the use of protein expression profiles, microarrays, and algorithms.

### CROSS REFERENCE TO RELATED APPLICATIONS

[0001] The present application is related to and claims, under 35 U.S.C. §119(e), the benefit of U.S. Provisional Patent Application Serial No. 60/276,947, filed Mar. 20, 2001, which is incorporated herein by reference.

### FIELD OF THE INVENTION

[0002] The present invention relates to gene expression profiles, algorithms to generate gene expression profiles, microarrays comprising nucleic acid sequences representing gene expression profiles, methods of using gene expression profiles and microarrays, and business methods directed to the use of gene expression profiles, microarrays, and algorithms.

[0003] The present invention further relates to protein expression profiles, algorithms to generate protein expression profiles, microarrays comprising protein-capture agents that bind proteins comprising protein expression profiles, methods of using protein expression profiles and microarrays, and business methods directed to the use of protein expression profiles, microarrays, and algorithms.

### BACKGROUND OF THE INVENTION

[0004] The identification and analysis of a particular gene or protein generally has been accomplished by experiments directed specifically towards that gene or protein. With the recent advances, however, in the sequencing of the human genome, the challenge is to decipher the expression, function, and regulation of thousands of genes, which cannot be realistically accomplished by analyzing one gene or protein at a time. To address this situation, DNA microarray technology has proven to be a valuable tool. By taking advantage of the sequence information obtained from DNA microarrays, the expression and functional relationship of thousands of genes may be resolved.

[0005] The expression profiles of thousands of genes have been examined en masse via cDNA and oligonucleotide microarrays. See, e.g., Lockhart et al., NUCLEIC ACIDS SYMP. SER. 11-12 (1998); Shalon et al., 46 PATHOL. BIOL. 107-109 (1998); Schena et al., 16 TRENDS BIOTECHNOL. 301-306 (1998). Several studies have analyzed gene expression profiles in yeast, mammalian cell lines, and disease tissues. See, e.g., Welford et al., 26 NUCLEIC ACIDS RES. 3059-3065 (1998); Cho et al., 2 MOL. CELL 65-73 (1997); Heller et al., 94 PROC. NATL. ACAD. SCI. USA 2150-2155 (1997); Schena et al., 93 PROC. NATL. ACAD. SCI. USA 10614-10619 (1996).

[0006] Microarray technology provides the means to decipher the function of a particular gene based on its expression profile and alterations in its expression levels. In addition, this technology may be used to define the components of cellular pathways as well as the regulation of these cellular components. High-density oligonucleotide microarrays may be used to simultaneously monitor thousands of genes or possibly entire genomes (e.g., Saccharomyces cerevisiae).

[0007] Microarrays may also be used for genetic and physical mapping of genomes, DNA sequencing, genetic diagnosis, and genotyping of organisms. Microarrays may be used to determine a medical diagnosis. For example, the identity of a pathogenic microorganism may be established unambiguously by hybridizing a patient sample to a microarray containing the genes from many types of known pathogenic DNA. A similar technique may also be used for genotyping an organism. For genetic diagnostics, a microarray may contain multiple forms of a mutated gene or multiple genes associated with a particular disease. The microarray may then be probed with DNA or RNA, isolated from a patient sample (e.g., blood sample), which may hybridize to one of the mutated or disease genes.

[0008] Microarrays containing molecular expression markers or predictor genes may be used to confirm tissue or cell identifications. In addition, disease progression may be monitored by analyzing the expression patterns of the predictor genes in disease tissues. An alteration in gene expression may be used to define the specific disease state and stage of the disease. Monitoring the efficacy of certain drug regimens may also be accomplished by analyzing the expression patterns of the predictor genes. For example, decreases or increases in gene expression may be indicative of the efficacy of a particular drug.

[0009] Generally, oligonucleotide probes are used to detect complementary nucleic acid sequences in a particular tissue or cell type. The oligonucleotide probes may be covalently attached to a support, and arrays of oligonucleotide probes immobilized on solid supports are used to detect specific nucleic acid sequences. To assess gene expression in a given tissue or cell sample, DNA or RNA is isolated from the tissue or cell, labeled with a fluorescent dye, and then hybridized to the DNA microarray. The microarray may contain hundreds to thousands of DNA sequences selected from cDNA libraries, genomic DNA, or expressed sequence tags (ESTs). These DNA sequences may be spotted or synthesized onto the support and then crosslinked to the support by ultraviolet radiation. Following hybridization, the fluorescence intensities of the microarray are analyzed, and these measurements are then used to determine the presence or relative quantity of a particular gene within the sample. This hybridization pattern is used to generate a gene expression profile of the target tissue or cell type.

[0010] Thus, differences in gene expression profiles may be used to identify the pathology of many diseases involving alterations of gene expression. The types of genes and their expression levels may distinguish normal tissue and diseased tissue. For example, cancer cells evolve from normal cells into highly invasive, metastatic malignancies, which frequently are induced by activation of oncogenes, or inactivation of tumor suppressor genes. Differentially expressed sequences can serve as markers or predictors of the transformed state and are, therefore, of potential value in the diagnosis and classification of tumors. The assessment of expression profiles may provide meaningful information with respect to tumor type and stage, treatment methods, and prognosis.

### SUMMARY OF THE INVENTION

[0011] The present invention relates to gene expression profiles, algorithms to generate gene expression profiles, microarrays comprising nucleic acid sequences representing gene expression profiles, methods of using gene expression profiles and microarrays, and business methods directed to the use of gene expression profiles, microarrays, and algorithms.

[0012] In a specific embodiment of the present invention, the gene expression profile may be an endothelial cell gene expression profile comprising one or more nucleic acid sequences substantially homologous to a nucleic acid sequence or complementary sequence thereof selected from the group consisting of SEQ ID NO: 1; SEQ ID NO: 2; SEQ ID NO: 3; SEQ ID NO: 4; SEQ ID NO: 5; SEQ ID NO: 6; SEQ ID NO: 7; SEQ ID NO: 8; SEQ ID NO: 9; SEQ ID NO: 10; SEQ ID NO: 11; SEQ ID NO: 12; SEQ ID NO: 13; SEQ ID NO: 14; SEQ ID NO: 15; SEQ ID NO: 16; SEQ ID NO: 17; SEQ ID NO: 18; SEQ ID NO: 19; SEQ ID NO: 20; SEQ ID NO: 21; SEQ ID NO: 22; SEQ ID NO: 23; SEQ ID NO: 48; SEQ ID NO: 63; SEQ ID NO: 70; SEQ ID NO: 82; SEQ ID NO: 94; and SEQ ID NO: 144. With regard to this gene expression profile, the present invention provides a microarray comprising one or more protein-capture agents that specifically bind to all or a portion of one or more of the proteins encoded by the genes comprising the gene expression profile.

[0013] In another embodiment of the present invention, the gene expression profile may be a muscle cell gene expression profile comprising one or more nucleic acid sequences substantially homologous to a nucleic acid sequence or complementary sequence thereof selected from the group consisting of SEQ ID NO: 24; SEQ ID NO: 25; SEQ ID NO: 26; SEQ ID NO: 27; SEQ ID NO: 28; SEQ ID NO: 29; SEQ ID NO: 30; SEQ ID NO: 31; SEQ ID NO: 32; SEQ ID NO: 33; SEQ ID NO: 34; SEQ ID NO: 35; SEQ ID NO: 36; SEQ ID NO: 37; SEQ ID NO: 39; SEQ ID NO: 40; SEQ ID NO: 41; SEQ ID NO: 42; SEQ ID NO: 54; SEQ ID NO: 55; and SEQ ID NO: 69. With regard to this gene expression profile, the present invention provides a microarray comprising one or more protein-capture agents that specifically bind to all or a portion of one or more of the proteins encoded by the genes comprising the gene expression profile.

[0014] In an alternative embodiment of the present invention, the gene expression profile may be a primary cell gene expression profile comprising one or more nucleic acid sequences or complementary sequences thereof, or portions of said nucleic acid sequences or complementary sequences thereof, selected from the group consisting of SEQ ID NO: 1; SEQ ID NO: 2; SEQ ID NO: 3; SEQ ID NO: 4; SEQ ID NO: 5; SEQ ID NO: 6; SEQ ID NO: 7; SEQ ID NO: 8; SEQ ID NO: 9; SEQ ID NO: 10; SEQ ID NO: 1; SEQ ID NO: 12; SEQ ID NO: 13; SEQ ID NO: 14; SEQ ID NO: 15; SEQ ID NO: 16; SEQ ID NO: 17; SEQ ID NO: 18; SEQ ID NO: 19; SEQ ID NO: 20; SEQ ID NO: 21; SEQ ID NO: 22; SEQ ID NO: 23; SEQ ID NO: 24; SEQ ID NO: 25; SEQ ID NO: 26; SEQ ID NO: 27; SEQ ID NO: 28; SEQ ID NO: 29; SEQ ID NO: 30; SEQ ID NO: 31; SEQ ID NO: 32; SEQ ID NO: 33; SEQ ID NO: 34; SEQ ID NO: 35; SEQ ID NO: 36; SEQ ID NO: 37; SEQ ID NO: 39; SEQ ID NO: 40; SEQ ID NO: 41; SEQ ID NO: 42; SEQ ID NO: 43; SEQ ID NO: 44; SEQ ID NO: 45; SEQ ID NO: 46; SEQ ID NO: 47; SEQ ID NO: 48; SEQ ID NO: 49; SEQ ID NO: 50; SEQ ID NO: 51; SEQ ID NO: 52; SEQ ID NO: 53; SEQ ID NO: 54; SEQ ID NO: 55; SEQ ID NO: 56; SEQ ID NO: 57; SEQ ID NO: 58; SEQ ID NO: 59; SEQ ID NO: 60; SEQ ID NO: 61; SEQ ID NO: 62; SEQ ID NO: 63; SEQ ID NO: 64; SEQ ID NO: 65; SEQ ID NO: 66; SEQ ID NO: 67; SEQ ID NO: 68; SEQ ID NO: 69; SEQ ID NO: 70; SEQ ID NO: 71; SEQ ID NO: 72; SEQ ID NO: 73; SEQ ID NO: 74; SEQ ID NO: 75; SEQ ID NO: 76; SEQ ID NO: 77; SEQ ID NO: 78; SEQ ID NO: 79; SEQ ID NO: 80; SEQ ID NO: 81; SEQ ID NO: 82; SEQ ID NO: 83; SEQ ID NO: 84; SEQ ID NO: 85; SEQ ID NO: 86; SEQ ID NO: 87; SEQ ID NO: 88; SEQ ID NO: 89; SEQ ID NO: 90; SEQ ID NO: 91; SEQ ID NO: 92; SEQ ID NO: 93; SEQ ID NO: 94; SEQ ID NO: 95; SEQ ID NO: 96; SEQ ID NO: 97; SEQ ID NO: 98; SEQ ID NO: 99; SEQ ID NO: 100; SEQ ID NO: 101; SEQ ID NO: 102; SEQ ID NO: 103; SEQ ID NO: 104; SEQ ID NO: 105; SEQ ID NO: 106; SEQ ID NO: 107; SEQ ID NO: 108; SEQ ID NO: 109; SEQ ID NO: 110; SEQ ID NO: 111; SEQ ID NO: 112; SEQ ID NO: 113; SEQ ID NO: 114; SEQ ID NO: 115; SEQ ID NO: 116; SEQ ID NO: 118; SEQ ID NO: 119; SEQ ID NO: 120; SEQ ID NO: 121; SEQ ID NO: 122; SEQ ID NO: 123; SEQ ID NO: 124; SEQ ID NO: 125; SEQ ID NO: 126; SEQ ID NO: 127; SEQ ID NO: 128; SEQ ID NO: 129; SEQ ID NO: 130; SEQ ID NO: 131; SEQ ID NO: 132; SEQ ID NO: 133; SEQ ID NO: 134; SEQ ID NO: 135; SEQ ID NO: 136; SEQ ID NO: 137; SEQ ID NO: 138; SEQ ID NO: 139; SEQ ID NO: 140; SEQ ID NO: 141; SEQ ID NO: 142; SEQ ID NO: 143; SEQ ID NO: 144; SEQ ID NO: 145; SEQ ID NO: 146; SEQ ID NO: 147; SEQ ID NO: 148; SEQ ID NO: 149; SEQ ID NO: 150; SEQ ID NO: 151; SEQ ID NO: 152; SEQ ID NO: 153; SEQ ID NO: 154; SEQ ID NO: 155; SEQ ID NO: 156; SEQ ID NO: 157; SEQ ID NO: 158; SEQ ID NO: 159; SEQ ID NO: 160; SEQ ID NO: 161; SEQ ID NO: 162; SEQ ID NO: 163; SEQ ID NO: 164; SEQ ID NO: 165; SEQ ID NO: 166; SEQ ID NO: 167; SEQ ID NO: 168; SEQ ID NO: 169; SEQ ID NO: 170; SEQ ID NO: 171; SEQ ID NO: 172; SEQ ID NO: 173; SEQ ID NO: 174; SEQ ID NO: 175; SEQ ID NO: 176; SEQ ID NO: 177; SEQ ID NO: 178; SEQ ID NO: 179; SEQ ID NO: 180; SEQ ID NO: 181; SEQ ID NO: 182; SEQ ID NO: 183; SEQ ID NO: 184; SEQ ID NO: 185; and SEQ ID NO: 186.

[0015] With regard to this gene expression profile, the present invention provides a microarray comprising one or more protein-capture agents that specifically bind to all or a portion of one or more of the proteins encoded by the genes comprising the gene expression profile.

[0016] In a further aspect of the present invention, the gene expression profile may be an epithelial cell gene expression profile comprising one or more nucleic acid sequences or complementary sequences thereof, or portions of said nucleic acid sequences or complementary sequences thereof, selected from the group consisting of SEQ ID NO: 47; SEQ ID NO: 60; SEQ ID NO: 67; SEQ ID NO: 73; SEQ ID NO: 75; SEQ ID NO: 76; SEQ ID NO: 77; SEQ ID NO: 78; SEQ ID NO: 80; SEQ ID NO: 96; SEQ ID NO: 98; SEQ ID NO: 99; SEQ ID NO: 111; SEQ ID NO: 112; SEQ ID NO: 123; SEQ ID NO: 127; SEQ ID NO: 131; SEQ ID NO: 150; SEQ ID NO: 153; SEQ ID NO: 154; SEQ ID NO: 155; SEQ ID NO: 156; SEQ ID NO: 157; SEQ ID NO: 158; SEQ ID NO: 159; SEQ ID NO: 160; SEQ ID NO: 161; SEQ ID NO: 162; SEQ ID NO: 163; SEQ ID NO: 164; SEQ ID NO: 165; SEQ ID NO: 166; SEQ ID NO: 167; SEQ ID NO: 168; SEQ ID NO: 169; SEQ ID NO: 170; SEQ ID NO: 171; SEQ ID NO: 172; SEQ ID NO: 173; SEQ ID NO: 174; SEQ ID NO: 175; SEQ ID NO: 176; SEQ ID NO: 177; SEQ ID NO: 178; SEQ ID NO: 179; SEQ ID NO: 180; SEQ ID NO: 181; SEQ ID NO: 182; SEQ ID NO: 183; SEQ ID NO: 184; SEQ ID NO: 185; and SEQ ID NO: 186. With regard to this gene expression profile, the present invention provides a microarray comprising one or more protein-capture agents that specifically bind to all or a portion of one or more of the proteins encoded by the genes comprising the gene expression profile.

[0017] In yet another embodiment, a keratinocyte epithelial cell gene expression profile may comprise one or more nucleic acid sequences or complementary sequences thereof, or portions of said nucleic acid sequences or complementary sequences thereof, selected from the group consisting of SEQ ID NO: 187; SEQ ID NO: 188; SEQ ID NO: 189; SEQ ID NO: 190; SEQ ID NO: 191; SEQ ID NO: 192; SEQ ID NO: 193; SEQ ID NO: 194; SEQ ID NO: 195; SEQ ID NO: 196; SEQ ID NO: 197; SEQ ID NO: 198; SEQ ID NO: 199; SEQ ID NO: 200; SEQ ID NO: 201; SEQ ID NO: 202; SEQ ID NO: 203; SEQ ID NO: 204; SEQ ID NO: 205; SEQ ID NO: 206; SEQ ID NO: 207; SEQ ID NO: 208; SEQ ID NO: 209; SEQ ID NO: 210; and SEQ ID NO: 211. With regard to this gene expression profile, the present invention provides a microarray comprising one or more protein-capture agents that specifically bind to all or a portion of one or more of the proteins encoded by the genes comprising the gene expression profile.

[0018] The present invention also provides a mammary epithelial cell gene expression profile comprising one or more nucleic acid sequences or complementary sequences thereof, or portions of said nucleic acid sequences or complementary sequences thereof, selected from the group consisting of SEQ ID NO: 78; SEQ ID NO: 212; SEQ ID NO: 213; SEQ ID NO: 216; SEQ ID NO: 225; SEQ ID NO: 226; SEQ ID NO: 227; SEQ ID NO: 239; SEQ ID NO: 271; SEQ ID NO: 285; and SEQ ID NO: 289. With regard to this gene expression profile, the present invention provides a microarray comprising one or more protein-capture agents that specifically bind to all or a portion of one or more of the proteins encoded by the genes comprising the gene expression profile.

[0019] In an alternative embodiment, a bronchial epithelial cell gene expression profile may comprise one or more nucleic acid sequences or complementary sequences thereof, or portions of said nucleic acid sequences or complementary sequences thereof, selected from the group consisting of SEQ ID NO: 27; SEQ ID NO: 131; SEQ ID NO: 150; SEQ ID NO: 169; SEQ ID NO: 214; SEQ ID NO: 215; SEQ ID NO: 223; SEQ ID NO: 224; SEQ ID NO: 241; SEQ ID NO: 243; SEQ ID NO: 244; SEQ ID NO: 255; SEQ ID NO: 256; SEQ ID NO: 261; and SEQ ID NO: 314. With regard to this gene expression profile, the present invention provides a microarray comprising one or more protein-capture agents that specifically bind to all or a portion of one or more of the proteins encoded by the genes comprising the gene expression profile.

[0020] The present invention also provides a prostate epithelial cell gene expression profile, which may comprise one or more nucleic acid sequences or complementary sequences thereof, or portions of said nucleic acid sequences or complementary sequences thereof, selected from the group consisting of SEQ ID NO: 64; SEQ ID NO: 217; SEQ ID NO: 218; SEQ ID NO: 259; SEQ ID NO: 293; SEQ ID NO: 302; and SEQ ID NO: 320. With regard to this gene expression profile, the present invention provides a microarray comprising one or more protein-capture agents that specifically bind to all or a portion of one or more of the proteins encoded by the genes comprising the gene expression profile.

[0021] In yet another embodiment, a renal cortical epithelial cell gene expression profile may comprise one or more nucleic acid sequences or complementary sequences thereof, or portions of said nucleic acid sequences or complementary sequences thereof, selected from the group consisting of SEQ ID NO: 49; SEQ ID NO: 57; SEQ ID NO: 104; SEQ ID NO: 123; SEQ ID NO: 160; SEQ ID NO: 165; SEQ ID NO: 166; SEQ ID NO: 219; SEQ ID NO: 267; SEQ ID NO: 270; SEQ ID NO: 279; SEQ ID NO: 280; SEQ ID NO: 283; SEQ ID NO: 291; SEQ ID NO: 305; SEQ ID NO: 307; SEQ ID NO: 310; SEQ ID NO: 313; SEQ ID NO: 325; SEQ ID NO: 326; and SEQ ID NO: 327. With regard to this gene expression profile, the present invention provides a microarray comprising one or more protein-capture agents that specifically bind to all or a portion of one or more of the proteins encoded by the genes comprising the gene expression profile.

[0022] The present invention further provides a renal proximal tubule epithelial cell gene expression profile comprising one or more nucleic acid sequences or complementary sequences thereof, or portions of said nucleic acid sequences or complementary sequences thereof, selected from the group consisting of SEQ ID NO: 106; SEQ ID NO: 138; SEQ ID NO: 158; SEQ ID NO: 228; SEQ ID NO: 236; SEQ ID NO: 242; SEQ ID NO: 250; SEQ ID NO: 258; SEQ ID NO: 260; SEQ ID NO: 262; SEQ ID NO: 266; SEQ ID NO: 272; SEQ ID NO: 273; SEQ ID NO: 274; SEQ ID NO: 275; SEQ ID NO: 276; SEQ ID NO: 278; SEQ ID NO: 284; SEQ ID NO: 288; SEQ ID NO: 295; SEQ ID NO: 296; SEQ ID NO: 297; SEQ ID NO: 299; SEQ ID NO: 300; SEQ ID NO: 301; SEQ ID NO: 306; SEQ ID NO: 308; SEQ ID NO: 309; SEQ ID NO: 311; SEQ ID NO: 316; SEQ ID NO: 318; SEQ ID NO: 321; SEQ ID NO: 322; SEQ ID NO: 328; and SEQ ID NO: 329. With regard to this gene expression profile, the present invention provides a microarray comprising one or more protein-capture agents that specifically bind to all or a portion of one or more of the proteins encoded by the genes comprising the gene expression profile.

[0023] In a specific embodiment, a small airway epithelial cell gene expression profile may comprise one or more nucleic acid sequences or complementary sequences thereof, or portions of said nucleic acid sequences or complementary sequences thereof, selected from the group consisting of SEQ ID NO: 173; SEQ ID NO: 174; SEQ ID NO: 183; SEQ ID NO: 220; SEQ ID NO: 221; SEQ ID NO: 222; SEQ ID NO: 229; SEQ ID NO: 230; SEQ ID NO: 231; SEQ ID NO: 232; SEQ ID NO: 233; SEQ ID NO: 234; SEQ ID NO: 235; SEQ ID NO: 237; SEQ ID NO: 238; SEQ ID NO: 240; SEQ ID NO: 245; SEQ ID NO: 246; SEQ ID NO: 247; SEQ ID NO: 248; SEQ ID NO: 249; SEQ ID NO: 251; SEQ ID NO: 252; SEQ ID NO: 254; SEQ ID NO: 257; SEQ ID NO: 263; SEQ ID NO: 264; SEQ ID NO: 265; SEQ ID NO: 268; SEQ ID NO: 269; SEQ ID NO: 270; SEQ ID NO: 277; SEQ ID NO: 281; SEQ ID NO: 282; SEQ ID NO: 286; SEQ ID NO: 287; SEQ ID NO: 290; SEQ ID NO: 294; SEQ ID NO: 298; SEQ ID NO: 303; SEQ ID NO: 312; SEQ ID NO: 315; SEQ ID NO: 317; and SEQ ID NO: 319. With regard to this gene expression profile, the present invention provides a microarray comprising one or more protein-capture agents that specifically bind to all or a portion of one or more of the proteins encoded by the genes comprising the gene expression profile.

[0024] The present invention also provides a renal epithelial cell gene expression profile comprising one or more nucleic acid sequences or complementary sequences thereof, or portions of said nucleic acid sequences or complementary sequences thereof, selected from the group consisting of SEQ ID NO: 37; SEQ ID NO: 253; SEQ ID NO: 304; SEQ ID NO: 323; and SEQ ID NO: 324. With regard to this gene expression profile, the present invention provides a microarray comprising one or more protein-capture agents that specifically bind to all or a portion of one or more of the proteins encoded by the genes comprising the gene expression profile.

[0025] In yet another embodiment of the present invention, the gene expression profiles may comprise one or more genes, wherein said gene expression profile is generated from a cell type selected from the group comprising coronary artery endothelium, umbilical artery endothelium, umbilical vein endothelium, aortic endothelium, dermal microvascular endothelium, pulmonary artery endothelium, myometrium microvascular endothelium, keratinocyte epithelium, bronchial epithelium, mammary epithelium, prostate epithelium, renal cortical epithelium, renal proximal tubule epithelium, small airway epithelium, renal epithelium, umbilical artery smooth muscle, neonatal dermal fibroblast, pulmonary artery smooth muscle, dermal fibroblast, neural progenitor cells, skeletal muscle, astrocytes, aortic smooth muscle, mesangial cells, coronary artery smooth muscle, bronchial smooth muscle, uterine smooth muscle, lung fibroblast, osteoblasts, and prostate stromal cells.

[0026] In another embodiment of the present invention, the microarray may be a microarray comprising an endothelial cell gene expression profile comprising one or more nucleic acid sequences substantially homologous to a nucleic acid sequence or complementary sequence thereof, or portions of said nucleic acid sequence or complementary sequence thereof, selected from the group consisting of SEQ ID NO: 1; SEQ ID NO: 2; SEQ ID NO: 3; SEQ ID NO: 4; SEQ ID NO: 5; SEQ ID NO: 6; SEQ ID NO: 7; SEQ ID NO: 8; SEQ ID NO: 9; SEQ ID NO: 10; SEQ ID NO: 11; SEQ ID NO: 12; SEQ ID NO: 13; SEQ ID NO: 14; SEQ ID NO: 15; SEQ ID NO: 16; SEQ ID NO: 17; SEQ ID NO: 18; SEQ ID NO: 19; SEQ ID NO: 20; SEQ ID NO: 21; SEQ ID NO: 22; SEQ ID NO: 23; SEQ ID NO: 48; SEQ ID NO: 63; SEQ ID NO: 70; SEQ ID NO: 82; SEQ ID NO: 94; and SEQ ID NO: 144.

[0027] The microarrays of the present invention may also comprise a microarray comprising a muscle cell gene expression profile comprising one or more nucleic acid sequences substantially homologous to a nucleic acid sequence or complementary sequence thereof, or portions of said nucleic acid sequence or complementary sequence thereof, selected from the group consisting of SEQ ID NO: 24; SEQ ID NO: 25; SEQ ID NO: 26; SEQ ID NO: 27; SEQ ID NO: 28; SEQ ID NO: 29; SEQ ID NO: 30; SEQ ID NO: 31; SEQ ID NO: 32; SEQ ID NO: 33; SEQ ID NO: 34; SEQ ID NO: 35; SEQ ID NO: 36; SEQ ID NO: 37; SEQ ID NO: 39; SEQ ID NO: 40; SEQ ID NO: 41; SEQ ID NO: 42; SEQ ID NO: 54; SEQ ID NO: 55; and SEQ ID NO: 69.

[0028] Also within the scope of the present invention are microarrays comprising a primary cell gene expression profile comprising one or more nucleic acid sequences substantially homologous to a nucleic acid sequence or complementary sequence thereof, or portions of said nucleic acid sequence or complementary sequence thereof, selected from the group consisting of SEQ ID NO: 1; SEQ ID NO: 2; SEQ ID NO: 3; SEQ ID NO: 4; SEQ ID NO: 5; SEQ ID NO: 6; SEQ ID NO: 7; SEQ ID NO: 8; SEQ ID NO: 9; SEQ ID NO: 10; SEQ ID NO: 1; SEQ ID NO: 12; SEQ ID NO: 13; SEQ ID NO: 14; SEQ ID NO: 15; SEQ ID NO: 16; SEQ ID NO: 17; SEQ ID NO: 18; SEQ ID NO: 19; SEQ ID NO: 20; SEQ ID NO: 21; SEQ ID NO: 22; SEQ ID NO: 23; SEQ ID NO: 24; SEQ ID NO: 25; SEQ ID NO: 26; SEQ ID NO: 27; SEQ ID NO: 28; SEQ ID NO: 29; SEQ ID NO: 30; SEQ ID NO: 31; SEQ ID NO: 32; SEQ ID NO: 33; SEQ ID NO: 34; SEQ ID NO: 35; SEQ ID NO: 36; SEQ ID NO: 37; SEQ ID NO: 39; SEQ ID NO: 40; SEQ ID NO: 41; SEQ ID NO: 42; SEQ ID NO: 43; SEQ ID NO: 44; SEQ ID NO: 45; SEQ ID NO: 46; SEQ ID NO: 47; SEQ ID NO: 48; SEQ ID NO: 49; SEQ ID NO: 50; SEQ ID NO: 51; SEQ ID NO: 52; SEQ ID NO: 53; SEQ ID NO: 54; SEQ ID NO: 55; SEQ ID NO: 56; SEQ ID NO: 57; SEQ ID NO: 58; SEQ ID NO: 59; SEQ ID NO: 60; SEQ ID NO: 61; SEQ ID NO: 62; SEQ ID NO: 63; SEQ ID NO: 64; SEQ ID NO: 65; SEQ ID NO: 66; SEQ ID NO: 67; SEQ ID NO: 68; SEQ ID NO: 69; SEQ ID NO: 70; SEQ ID NO: 71; SEQ ID NO: 72; SEQ ID NO: 73; SEQ ID NO: 74; SEQ ID NO: 75; SEQ ID NO: 76; SEQ ID NO: 77; SEQ ID NO: 78; SEQ ID NO: 79; SEQ ID NO: 80; SEQ ID NO: 81; SEQ ID NO: 82; SEQ ID NO: 83; SEQ ID NO: 84; SEQ ID NO: 85; SEQ ID NO: 86; SEQ ID NO: 87; SEQ ID NO: 88; SEQ ID NO: 89; SEQ ID NO: 90; SEQ ID NO: 91; SEQ ID NO: 92; SEQ ID NO: 93; SEQ ID NO: 94; SEQ ID NO: 95; SEQ ID NO: 96; SEQ ID NO: 97; SEQ ID NO: 98; SEQ ID NO: 99; SEQ ID NO: 100; SEQ ID NO: 101; SEQ ID NO: 102; SEQ ID NO: 103; SEQ ID NO: 104; SEQ ID NO: 105; SEQ ID NO:. 106; SEQ ID NO: 107; SEQ ID NO: 108; SEQ ID NO: 109; SEQ ID NO: 110; SEQ ID NO: 11; SEQ ID NO: 112; SEQ ID NO: 113; SEQ ID NO: 114; SEQ ID NO: 115; SEQ ID NO: 116; SEQ ID NO: 118; SEQ ID NO: 119; SEQ ID NO: 120; SEQ ID NO: 121; SEQ ID NO: 122; SEQ ID NO: 123; SEQ ID NO: 124; SEQ ID NO: 125; SEQ ID NO: 126; SEQ ID NO: 127; SEQ ID NO: 128; SEQ ID NO: 129; SEQ ID NO: 130; SEQ ID NO: 131; SEQ ID NO: 132; SEQ ID NO: 133; SEQ ID NO: 134; SEQ ID NO: 135; SEQ ID NO: 136; SEQ ID NO: 137; SEQ ID NO: 138; SEQ ID NO: 139; SEQ ID NO: 140; SEQ ID NO: 141; SEQ ID NO: 142; SEQ ID NO: 143; SEQ ID NO: 144; SEQ ID NO: 145; SEQ ID NO: 146; SEQ ID NO: 147; SEQ ID NO: 148; SEQ ID NO: 149; SEQ ID NO: 150; SEQ ID NO: 151; SEQ ID NO: 152; SEQ ID NO: 153; SEQ ID NO: 154; SEQ ID NO: 155; SEQ ID NO: 156; SEQ ID NO: 157; SEQ ID NO: 158; SEQ ID NO: 159; SEQ ID NO: 160; SEQ ID NO: 161; SEQ ID NO: 162; SEQ ID NO: 163; SEQ ID NO: 164; SEQ ID NO: 165; SEQ ID NO: 166; SEQ ID NO: 167; SEQ ID NO: 168; SEQ ID NO: 169; SEQ ID NO: 170; SEQ ID NO: 171; SEQ ID NO: 172; SEQ ID NO: 173; SEQ ID NO: 174; SEQ ID NO: 175; SEQ ID NO: 176; SEQ ID NO: 177; SEQ ID NO: 178; SEQ ID NO: 179; SEQ ID NO: 180; SEQ ID NO: 181; SEQ ID NO: 182; SEQ ID NO: 183; SEQ ID NO: 184; SEQ ID NO: 185; and SEQ ID NO: 186.

[0029] In a further embodiment, the microarray may be a microarray comprising an epithelial cell gene expression profile comprising one or more nucleic acid sequences substantially homologous to a nucleic acid sequence or complementary sequence thereof, or portions of said nucleic acid sequence or complementary sequence thereof, selected from the group consisting of SEQ ID NO: 47; SEQ ID NO: 60; SEQ ID NO: 67; SEQ ID NO: 73; SEQ ID NO: 75; SEQ ID NO: 76; SEQ ID NO: 77; SEQ ID NO: 78; SEQ ID NO: 80; SEQ ID NO: 96; SEQ ID NO: 98; SEQ ID NO: 99; SEQ ID NO: 11; SEQ ID NO: 112; SEQ ID NO: 123; SEQ ID NO: 127; SEQ ID NO: 131; SEQ ID NO: 150; SEQ ID NO: 153; SEQ ID NO: 154; SEQ ID NO: 155; SEQ ID NO: 156; SEQ ID NO: 157; SEQ ID NO: 158; SEQ ID NO: 159; SEQ ID NO: 160; SEQ ID NO: 161; SEQ ID NO: 162; SEQ ID NO: 163; SEQ ID NO: 164; SEQ ID NO: 165; SEQ ID NO: 166; SEQ ID NO: 167; SEQ ID NO: 168; SEQ ID NO: 169; SEQ ID NO: 170; SEQ ID NO: 171; SEQ ID NO: 172; SEQ ID NO: 173; SEQ ID NO: 174; SEQ ID NO: 175; SEQ ID NO: 176; SEQ ID NO: 177; SEQ ID NO: 178; SEQ ID NO: 179; SEQ ID NO: 180; SEQ ID NO: 181; SEQ ID NO: 182; SEQ ID NO: 183; SEQ ID NO: 184; SEQ ID NO: 185; and SEQ ID NO: 186.

[0030] In yet another embodiment, a microarray may comprise a keratinocyte epithelial cell gene expression profile comprising one or more nucleic acid sequences substantially homologous to a nucleic acid sequence or complementary sequence thereof, or portions of said nucleic acid sequence or complementary sequence thereof, selected from the group consisting of SEQ ID NO: 187; SEQ ID NO: 188; SEQ ID NO: 189; SEQ ID NO: 190; SEQ ID NO: 191; SEQ ID NO: 192; SEQ ID NO: 193; SEQ ID NO: 194; SEQ ID NO: 195; SEQ ID NO: 196; SEQ ID NO: 197; SEQ ID NO: 198; SEQ ID NO: 199; SEQ ID NO: 200; SEQ ID NO: 201; SEQ ID NO: 202; SEQ ID NO: 203; SEQ ID NO: 204; SEQ ID NO: 205; SEQ ID NO: 206; SEQ ID NO: 207; SEQ ID NO: 208; SEQ ID NO: 209; SEQ ID NO: 210; and SEQ ID NO: 211.

[0031] The present invention also provides a microarray comprising a mammary epithelial cell gene expression profile comprising one or more nucleic acid sequences substantially homologous to a nucleic acid sequence or complementary sequence thereof, or portions of said nucleic acid sequence or complementary sequence thereof, selected from the group consisting of SEQ ID NO: 78; SEQ ID NO: 212; SEQ ID NO: 213; SEQ ID NO: 216; SEQ ID NO: 225; SEQ ID NO: 226; SEQ ID NO: 227; SEQ ID NO: 239; SEQ ID NO: 271; SEQ ID NO: 285; and SEQ ID NO: 289.

[0032] In an alternative embodiment, a microarray may comprise a bronchial epithelial cell gene expression profile comprising one or more nucleic acid sequences substantially homologous to a nucleic acid sequence or complementary sequence thereof, or portions of said nucleic acid sequence or complementary sequence thereof, selected from the group consisting of SEQ ID NO: 27; SEQ ID NO: 131; SEQ ID NO: 150; SEQ ID NO: 169; SEQ ID NO: 214; SEQ ID NO: 215; SEQ ID NO: 223; SEQ ID NO: 224; SEQ ID NO: 241; SEQ ID NO: 243; SEQ ID NO: 244; SEQ ID NO: 255; SEQ ID NO: 256; SEQ ID NO: 261; and SEQ ID NO: 314.

[0033] The present invention also provides a microarray comprising a prostate epithelial cell gene expression profile comprising one or more nucleic acid sequences substantially homologous to a nucleic acid sequence or complementary sequence thereof, or portions of said nucleic acid sequence or complementary sequence thereof, selected from the group consisting of SEQ ID NO: 64; SEQ ID NO: 217; SEQ ID NO: 218; SEQ ID NO: 259; SEQ ID NO: 293; SEQ ID NO: 302; and SEQ ID NO: 320.

[0034] In yet another embodiment, a microarray comprises a renal cortical epithelial cell gene expression profile comprising one or more nucleic acid sequences substantially homologous to a nucleic acid sequence or complementary sequence thereof, or portions of said nucleic acid sequence or complementary sequence thereof, selected from the group consisting of SEQ ID NO: 49; SEQ ID NO: 57; SEQ ID NO: 104; SEQ ID NO: 123; SEQ ID NO: 160; SEQ ID NO: 165; SEQ ID NO: 166; SEQ ID NO: 219; SEQ ID NO: 267; SEQ ID NO: 270; SEQ ID NO: 279; SEQ ID NO: 280; SEQ ID NO: 283; SEQ ID NO: 291; SEQ ID NO: 305; SEQ ID NO: 307; SEQ ID NO: 310; SEQ ID NO: 313; SEQ ID NO: 325; SEQ ID NO: 326; and SEQ ID NO: 327.

[0035] The present invention further provides a microarray comprising a renal proximal tubule epithelial cell gene expression profile comprising one or more nucleic acid sequences substantially homologous to a nucleic acid sequence or complementary sequence thereof, or portions of said nucleic acid sequence or complementary sequence thereof, selected from the group consisting of SEQ ID NO: 106; SEQ ID NO: 138; SEQ ID NO: 158; SEQ ID NO: 228; SEQ ID NO: 236; SEQ ID NO: 242; SEQ ID NO: 250; SEQ ID NO: 258; SEQ ID NO: 260; SEQ ID NO: 262; SEQ ID NO: 266; SEQ ID NO: 272; SEQ ID NO: 273; SEQ ID NO: 274; SEQ ID NO: 275; SEQ ID NO: 276; SEQ ID NO: 278; SEQ ID NO: 284; SEQ ID NO: 288; SEQ ID NO: 295; SEQ ID NO: 296; SEQ ID NO: 297; SEQ ID NO: 299; SEQ ID NO: 300; SEQ ID NO: 301; SEQ ID NO: 306; SEQ ID NO: 308; SEQ ID NO: 309; SEQ ID NO: 311; SEQ ID NO: 316; SEQ ID NO: 318; SEQ ID NO: 321; SEQ ID NO: 322; SEQ ID NO: 328; and SEQ ID NO: 329.

[0036] In a specific embodiment, a microarray may comprise a small airway epithelial cell gene expression profile comprising one or more nucleic acid sequences substantially homologous to a nucleic acid sequence or complementary sequence thereof, or portions of said nucleic acid sequence or complementary sequence thereof, selected from the group consisting of SEQ ID NO: 173; SEQ ID NO: 174; SEQ ID NO: 183; SEQ ID NO: 220; SEQ ID NO: 221; SEQ ID NO: 222; SEQ ID NO: 229; SEQ ID NO: 230; SEQ ID NO: 231; SEQ ID NO: 232; SEQ ID NO: 233; SEQ ID NO: 234; SEQ ID NO: 235; SEQ ID NO: 237; SEQ ID NO: 238; SEQ ID NO: 240; SEQ ID NO: 245; SEQ ID NO: 246; SEQ ID NO: 247; SEQ ID NO: 248; SEQ ID NO: 249; SEQ ID NO: 251; SEQ ID NO: 252; SEQ ID NO: 254; SEQ ID NO: 257; SEQ ID NO: 263; SEQ ID NO: 264; SEQ ID NO: 265; SEQ ID NO: 268; SEQ ID NO: 269; SEQ ID NO: 270; SEQ ID NO: 277; SEQ ID NO: 281; SEQ ID NO: 282; SEQ ID NO: 286; SEQ ID NO: 287; SEQ ID NO: 290; SEQ ID NO: 294; SEQ ID NO: 298; SEQ ID NO: 303; SEQ ID NO: 312; SEQ ID NO: 315; SEQ ID NO: 317; and SEQ ID NO: 319.

[0037] The present invention also provides a microarray comprising a renal epithelial cell gene expression profile comprising one or more nucleic acid sequences substantially homologous to a nucleic acid sequence or complementary sequence thereof, or portions of said nucleic acid sequence or complementary sequence thereof, selected from the group consisting of SEQ ID NO: 37; SEQ ID NO: 253; SEQ ID NO: 304; SEQ ID NO: 323; and SEQ ID NO: 324.

[0038] In yet another embodiment, a microarray may comprise one or more nucleic acid sequences substantially homologous to a nucleic acid sequence or complementary sequence thereof, or portions of said nucleic acid sequence or complementary sequence thereof, selected from the group consisting of SEQ ID NO: 27; SEQ ID NO: 37; SEQ ID NO: 49; SEQ ID NO: 57; SEQ ID NO: 64; SEQ ID NO: 70; SEQ ID NO: 78; SEQ ID NO: 104; SEQ ID NO: 106; SEQ ID NO: 123; SEQ ID NO: 131; SEQ ID NO: 138; SEQ ID NO: 150; SEQ ID NO: 158; SEQ ID NO: 160; SEQ ID NO: 165; SEQ ID NO: 166; SEQ ID NO: 169; SEQ ID NO: 173; SEQ ID NO: 174; SEQ ID NO: 183; SEQ ID NO: 187; SEQ ID NO: 188; SEQ ID NO: 189; SEQ ID NO: 190; SEQ ID NO: 191; SEQ ID NO: 192; SEQ ID NO: 193; SEQ ID NO: 194; SEQ ID NO: 195; SEQ ID NO: 196; SEQ ID NO: 197; SEQ ID NO: 198; SEQ ID NO: 199; SEQ ID NO: 200; SEQ ID NO: 201; SEQ ID NO: 202; SEQ ID NO: 203; SEQ ID NO: 204; SEQ ID NO: 205; SEQ ID NO: 206; SEQ ID NO: 207; SEQ ID NO: 208; SEQ ID NO: 209; SEQ ID NO: 210; SEQ ID NO: 211; SEQ ID NO: 212; SEQ ID NO: 213; SEQ ID NO: 214; SEQ ID NO: 215; SEQ ID NO: 216; SEQ ID NO: 217; SEQ ID NO: 218; SEQ ID NO: 219; SEQ ID NO: 220; SEQ ID NO: 221; SEQ ID NO: 222; SEQ ID NO: 223; SEQ ID NO: 224; SEQ ID NO: 225; SEQ ID NO: 226; SEQ ID NO: 227; SEQ ID NO: 228; SEQ ID NO: 229; SEQ ID NO: 230; SEQ ID NO: 231; SEQ ID NO: 232; SEQ ID NO: 233; SEQ ID NO: 234; SEQ ID NO: 235; SEQ ID NO: 236; SEQ ID NO: 237; SEQ ID NO: 238; SEQ ID NO: 239; SEQ ID NO: 240; SEQ ID NO: 241; SEQ ID NO: 242; SEQ ID NO: 243; SEQ ID NO: 244; SEQ ID NO: 245; SEQ ID NO: 246; SEQ ID NO: 247; SEQ ID NO: 248; SEQ ID NO: 249; SEQ ID NO: 250; SEQ ID NO: 251; SEQ ID NO: 252; SEQ ID NO: 253; SEQ ID NO: 254; SEQ ID NO: 255; SEQ ID NO: 256; SEQ ID NO: 257; SEQ ID NO: 258; SEQ ID NO: 259; SEQ ID NO: 260; SEQ ID NO: 261; SEQ ID NO: 262; SEQ ID NO: 263; SEQ ID NO: 264; SEQ ID NO: 265; SEQ ID NO: 266; SEQ ID NO: 267; SEQ ID NO: 268; SEQ ID NO: 269; SEQ ID NO: 270; SEQ ID NO: 271; SEQ ID NO: 272; SEQ ID NO: 273; SEQ ID NO: 274; SEQ ID NO: 275; SEQ ID NO: 276; SEQ ID NO: 277; SEQ ID NO: 278; SEQ ID NO: 279; SEQ ID NO: 280; SEQ ID NO: 281; SEQ ID NO: 282; SEQ ID NO: 283; SEQ ID NO: 284; SEQ ID NO: 285; SEQ ID NO: 286; SEQ ID NO: 287; SEQ ID NO: 288; SEQ ID NO: 289; SEQ ID NO: 290; SEQ ID NO: 291; SEQ ID NO: 293; SEQ ID NO: 294; SEQ ID NO: 295; SEQ ID NO: 296; SEQ ID NO: 297; SEQ ID NO: 298; SEQ ID NO: 299; SEQ ID NO: 300; SEQ ID NO: 301; SEQ ID NO: 302; SEQ ID NO: 303; SEQ ID NO: 304; SEQ ID NO: 305; SEQ ID NO: 306; SEQ ID NO: 307; SEQ ID NO: 308; SEQ ID NO: 309; SEQ ID NO: 310; SEQ ID NO: 311; SEQ ID NO: 312; SEQ ID NO: 313; SEQ ID NO: 314; SEQ ID NO: 315; SEQ ID NO: 316; SEQ ID NO: 317; SEQ ID NO: 318; SEQ ID NO: 320; SEQ ID NO: 321; SEQ ID NO: 322; SEQ ID NO: 323; SEQ ID NO: 324; SEQ ID NO: 325; SEQ ID NO: 326; SEQ ID NO: 327; SEQ ID NO: 328; and SEQ ID NO: 329.

[0039] In another embodiment, the present invention provides a microarray comprising a gene expression profile comprising one or more genes or oligonucleotide probes obtained therefrom, wherein said gene expression profile is generated from a cell type selected from the group comprising coronary artery endothelium, umbilical artery endothelium, umbilical vein endothelium, aortic endothelium, dermal microvascular endothelium, pulmonary artery endothelium, myometrium microvascular endothelium, keratinocyte epithelium, bronchial epithelium, mammary epithelium, prostate epithelium, renal cortical epithelium, renal proximal tubule epithelium, small airway epithelium, renal epithelium, umbilical artery smooth muscle, neonatal dermal fibroblast, pulmonary artery smooth muscle, dermal fibroblast, neural progenitor cells, skeletal muscle, astrocytes, aortic smooth muscle, mesangial cells, coronary artery smooth muscle, bronchial smooth muscle, uterine smooth muscle, lung fibroblast, osteoblasts, and prostate stromal cells.

[0040] This invention also relates to methods of doing business comprising the steps of determining the level of RNA expression for an RNA sample, wherein the RNA sample is amplified, fluorescently labeled, and hybridized to a microarray containing a plurality of nucleic acid sequences, and wherein the microarray is scanned for fluorescence; normalizing the expression levels using an algorithm, and scoring the RNA sample against a gene expression profile database. In one embodiment, the RNA sample is obtained from a patient and the patient sample includes, but is not limited to, blood, amniotic fluid, plasma, semen, bone marrow, and tissue biopsy.

[0041] In another aspect of this method, the algorithm is either the MaxCor algorithm or the Mean Log Ratio algorithm. The invention described herein further provides algorithms useful for generating gene expression profiles. Specifically, the present invention provides for either the MaxCor algorithm or the Mean Log Ratio algorithm to generate a gene expression profile.

[0042] The present invention also relates to a method of constructing a gene expression profile comprising the steps of hybridizing prepared RNA samples to a microarray containing a plurality of known nucleic acid sequences representing genes of a particular organism; obtaining an expression level for each gene on a microarray; and normalizing the expression level for each gene on a microarray to control standards.

[0043] In a further aspect, the method of constructing a gene expression profile comprises the steps applying an algorithm to each of the normalized gene expression levels; performing a correlation analysis for all normalized gene expression microarrays within a group of samples; establishing a gene expression profile using a signature extraction algorithm; and validating the gene expression profile.

[0044] In one embodiment, the algorithm of the profile construction method is the MaxCor algorithm. Specifically, the MaxCor algorithm is used to generate a numeric value that is assigned to each gene based upon the expression level contained on the microarray. In one embodiment, the numeric value is between the range of (−1,+1). In particular, a negative numeric value represents a gene with relatively lower expression; a zero numeric value represents no relative gene expression difference; and a positive numeric value represents a gene with relatively higher expression.

[0045] In one embodiment, the numeric value is between the range of (−2,+2). In particular, a negative numeric value represents a gene with relatively lower expression; a zero numeric value represents no relative gene expression difference; and a positive numeric value represents a gene with relatively higher expression.

[0046] In another embodiment, the algorithm of the profile construction method is the Mean Log Ratio algorithm. Specifically, the Mean Log Ratio algorithm is used to generate a numeric value that is assigned to each gene based upon the expression level contained on the microarray. In one embodiment, the numeric value is between the range of (−1,+1). In particular, a negative numeric value represents a gene with relatively lower expression; a zero numeric value represents no relative gene expression difference; and a positive numeric value represents a gene with relatively higher expression.

[0047] In one embodiment, the numeric value is between the range of (−2,+2). In particular, a negative numeric value represents a gene with relatively lower expression; a zero numeric value represents no relative gene expression difference; and a positive numeric value represents a gene with relatively higher expression.

[0048] The present invention further provides a method, in a computer system, for constructing and analyzing a gene expression profile comprising the steps of inputting gene expression data for each of a plurality of genes; normalizing expression data by transforming said data into log ratio values; filtering weak differential values; applying an algorithm to each of said normalized gene expression values; performing a classification analysis for all normalized gene expression values; establishing a gene expression profile; and validating the gene expression profile. The algorithm may be the MaxCor algorithm or the Mean Log Ratio algorithm.

[0049] This invention is also related to computer programs for constructing and analyzing a gene expression signature. These computer programs may comprise computer code that receives as input gene expression data for a plurality of genes; computer code that normalizes expression data by transforming the data into log ratio values; computer code that applies an algorithm to each of the normalized gene expression values; computer code that performs a correlation analysis for the normalized gene expression values; computer code that establishes and validates the gene expression profile; and computer readable medium that stores computer code. The computer program may utilize the MaxCor algorithm or the Mean Log Ratio algorithm for gene expression profile analysis.

[0050] The present invention also provides methods for identifyng the phenotype of an unknown cell. This method comprises applying an algorithm to extract a gene expression profile from gene expression data generated from the cell; and matching the gene expression profile to a gene expression profile generated from a cell of known phenotype. In one embodiment, the algorithm is the MaxCor algorithm. In an alternative embodiment, the algorithm is the Mean Log Ratio algorithm.

[0051] In a particular embodiment, the application of an algorithm to extract a gene expression profile comprises setting a cutoff value for expression relative to normalized values, wherein said cutoff value is at least about two-fold induction above the normalized values. Moreover, the matching step may be performed using a database comprising one or more gene expression profiles generated from cells of known phenotype.

[0052] The present invention further provides methods for distinguishing cell types comprising using an algorithm to generate a gene expression profile from a biological sample; and matching said generated gene expression profile to a gene expression profile of a specific cell type. In one embodiment, the algorithm is the MaxCor algorithm. In an alternative embodiment, the algorithm is the Mean Log Ratio algorithm.

[0053] In a further embodiment, the specific cell type is selected from the group consisting of coronary artery endothelium, umbilical artery endothelium, umbilical vein endothelium, aortic endothelium, dermal microvascular endothelium, pulmonary artery endothelium, myometrium microvascular endothelium, keratinocyte epithelium, bronchial epithelium, mammary epithelium, prostate epithelium, renal cortical epithelium, renal proximal tubule epithelium, small airway epithelium, renal epithelium, umbilical artery smooth muscle, neonatal dermal fibroblast, pulmonary artery smooth muscle, dermal fibroblast, neural progenitor cells, skeletal muscle, astrocytes, aortic smooth muscle, mesangial cells, coronary artery smooth muscle, bronchial smooth muscle, uterine smooth muscle, lung fibroblast, osteoblasts, and prostate stromal cells.

[0054] In a specific embodiment, the present invention provides a method for determining the phenotype of a cell comprising the steps of applying an algorithm to extract a protein expression profile from protein expression data generated from the cell and matching the protein expression profile to a protein expression profile generated from a cell of known phenotype.

[0055] In one embodiment, the algorithm is the MaxCor algorithm. In an alternative embodiment, the algorithm is the Mean Log Ratio algorithm. In yet another embodiment, the applying step comprises setting a cutoff value for expression relative to normalized values, wherein said cutoff value is at least about two-fold induction above the normalized values. In yet another embodiment, the matching step is performed using a database comprising one or more protein expression profiles generated from cells of known phenotype.

[0056] The present invention provides a method for distinguishing cell types comprising the step of matching a protein expression profile generated from a biological sample using an algorithm to a known protein expression profile of a specific cell type. In one embodiment, the algorithm is the MaxCor algorithm. In an alternative embodiment, the algorithm is the Mean Log Ratio algorithm.

[0057] In a further embodiment, the specific cell type is selected from the group consisting of coronary artery endothelium, umbilical artery endothelium, umbilical vein endothelium, aortic endothelium, dermal microvascular endothelium, pulmonary artery endothelium, myometrium microvascular endothelium, keratinocyte epithelium, bronchial epithelium, mammary epithelium, prostate epithelium, renal cortical epithelium, renal proximal tubule epithelium, small airway epithelium, renal epithelium, umbilical artery smooth muscle, neonatal dermal fibroblast, pulmonary artery smooth muscle, dermal fibroblast, neural progenitor cells, skeletal muscle, astrocytes, aortic smooth muscle, mesangial cells, coronary artery smooth muscle, bronchial smooth muscle, uterine smooth muscle, lung fibroblast, osteoblasts, and prostate stromal cells.

### BRIEF DESCRIPTION OF THE DRAWINGS

[0058] FIG. 1. Laser capture microdissection (LCM) of 10 μm Nissl-stained sections of adult rat large and small dorsal root ganglion (DRG) neurons. The arrows indicate DRG neurons to be captured (top panel). The middle and bottom panels show successful capture and film transfer respectively.

[0059] FIGS. 2a-2b. Microarray of cDNA expression patterns of small (S) and large (L) neurons. FIG. 2a is an example of the cDNA microarray data obtained. Boxed in white is an identical region of the microarray for L1 and S1 samples that is enlarged (shown directly below). In FIG. 2b, scatter plots are shown that demonstrate the correlation between independent amplifications of S1 vs. S2, S1 vs. S3, L1 vs. L2, and L (L1 and L2) vs. S(S1, S2, and S3).

[0060] FIG. 3. Preferentially expressed mRNAs identified in small DRG neurons. The ratio value describes the mean fluorescence intensity ratio of the small DRG neurons as compared to the large DRG neurons.

[0061] FIG. 4. Preferentially expressed mRNAs identified in large DRG neurons. The ratio value describes the mean fluorescence intensity ratio of the large DRG neurons as compared to the small DRG neurons.

[0062] FIG. 5. Representative fields of in situ hybridization of rat DRG with selected cDNAs. The sections were Nissl-counterstained. The left panel shows results with radiolabeled probes encoding neurofilament-high (NF-H), neurofilament-low (NF-L) and β-1 subunit of the voltage-gated sodium channel (SCNβ-1). Arrows in the left panel denote identifiable small neurons. The right panel shows representative fields from radiolabeled probes encoding calcitonin gene-related product (CGRP), voltage-gated sodium channel (NaN), and phospholipase C delta-4 (PLC). Arrows in the right panel denote identifiable large neurons. The large arrowhead denotes a large neuron which is also labeled.

[0063] FIG. 6. In situ hybridization of selected cDNAs identified in small DRG neurons and large DRG neurons. Based on quantitative measurements comparing the overall intensity of signal in small and large neurons and the percentage of cells labeled within the total population of either small or large neurons, the preferential expression of these mRNAs was demonstrated.

[0064] FIG. 7. Profile extraction analysis of several primary cell types. Clustering analysis of the gene expression profiles of the primary cell samples confirmed that these cell types could be classified into three groups: endothelial, epithelial, and muscle cell.

[0065] FIG. 8. Cluster analysis of the 30 gene expression vectors using the hclust algorithm in the S-plus statistical package (MathSoft, Inc., Cambridge, Mass.). The hclust algorithm groups together primary cells with similar gene expression patterns. The three sample groups (endothelial, epithelial, and muscle cells) were easily separated.

[0066] FIGS. 9a-9t. The gene expression profile of human primary cells. The profile represents 459 genes identified from 30 primary cell types. The sequence source (Seq. Source) is the gene database (GB: GenBank; INCYTE: Incyte Genomes) from which the sequence was selected. The endothelial, epithelial, and muscle profile values are the numeric representation of the specific profile. The p-value is based on the Kruskal-Wallis rank test in which smaller p-values represent clones with higher discriminate power for classifying samples. The source description identifies the particular gene.

[0067] FIGS. 10a-10c. The gene expression profile of endothelial cells. The sequence source (Seq. Source) is the gene database (GB: GenBank; INCYTE: Incyte Genomes) from which the sequence was selected. The endothelial, epithelial, and muscle profile values are the numeric representation of the specific profile. The p-value is based on the Kruskal-Wallis rank test in which smaller p-values represent clones with higher discriminate power for classifying samples. The source description identifies the particular gene.

[0068] FIGS. 11a-11c. The gene expression profile of epithelial cells. The sequence source (Seq. Source) is the gene database (GB: GenBank; INCYTE: Incyte Genomes) from which the sequence was selected. The endothelial, epithelial, and muscle profile values are the numeric representation of the specific profile. The p-value is based on the Kruskal-Wallis rank test in which smaller p-values represent clones with higher discriminate power for classifying samples. The source description identifies the particular gene.

[0069] FIGS. 12a-12b. The gene expression profile of muscle cells. The sequence source (Seq. Source) is the gene database (GB: GenBank; INCYTE: Incyte Genomes) from which the sequence was selected. The endothelial, epithelial, and muscle profile values are the numeric representation of the specific profile. The p-value is based on the Kruskal-Wallis rank test in which smaller p-values represent clones with higher discriminate power for classifying samples. The source description identifies the particular gene.

[0070] FIG. 13. The profile vectors (endothelial, epithelial, and muscle) generated by using the Mean Log Ratio and MaxCor algorithms are plotted graphically. The numbers are plotted according to the color bar. Numbers in the middle are plotted with colors in between as indicated.

[0071] FIG. 14. Self-validation analysis using the Mean Log Ratio algorithm. Each of the 30 samples was scored against the three expression profiles generated by using all 30 samples. The scores are plotted on the bar chart (white—endothelial, black—epithelial, hatched—muscle). The order of the primary cells is listed in FIG. 7.

[0072] FIG. 15. Omit-one analysis using the Mean Log Ratio algorithm. Each of the 30 samples was scored against the three expression profiles generated by using all but the sample omitted. The scores are plotted on the bar chart (white—endothelial, black—epithelial, hatched—muscle). The order of the primary cells is listed on FIG. 7.

[0073] FIG. 16. Self-validation analysis using the MaxCor algorithm. Each of the 30 samples were scored against the three expression profiles generated by using all 30 samples. The scores are plotted on the bar chart (white—endothelial, black—epithelial, hatched—muscle). The order of the primary cells is listed on FIG. 7.

[0074] FIG. 17. Omit-one analysis using the MaxCor algorithm. Each of the 30 samples was scored against the three expression profiles generated by using all but the sample omitted. The scores are plotted on the bar chart (white—endothelial, black—epithelial, hatched—muscle). The order of the primary cells is listed on FIG. 7.

[0075] FIGS. 18a-18f. Gene expression profiles of epithelial cell lines derived from keratinocyte epithelium, mammary epithelium, bronchial epithelium, prostate epithelium, renal cortical epithelium, renal proximal tubule epithelium, small airway epithelium, and renal epithelium. The data is sorted from highest relative expression to lowest relative expression for keratinocyte epithelial cells.

### DETAILED DESCRIPTION OF THE INVENTION

[0076] It is to be understood that this invention is not limited to the particular methodology, protocols, cell lines, animal species or genera, constructs, or reagents described and as such may vary. It is also to be understood that the terminology used herein is for the purpose of describing particular embodiments only, and is not intended to limit the scope of the present invention which will be limited only by the appended claims.

[0077] It must be noted that as used herein and in the appended claims, the singular forms “a,” “an,” and “the” include plural reference unless the context clearly dictates otherwise. Thus, for example, reference to “a protein” is a reference to one or more proteins and includes equivalents thereof known to those skilled in the art, and so forth.

[0078] Unless defined otherwise, all technical and scientific terms used herein have the same meaning as commonly understood to one of ordinary skill in the art to which this invention belongs. Although any methods, devices, and materials similar or equivalent to those described herein can be used in the practice or testing of the invention, the preferred methods, devices and materials are now described.

[0079] All publications and patents mentioned herein are hereby incorporated by reference for the purpose of describing and disclosing, for example, the constructs and methodologies that are described in the publications which might be used in connection with the presently described invention. The publications discussed above and throughout the text are provided solely for their disclosure prior to the filing date of the present application. Nothing herein is to be construed as an admission that the inventors are not entitled to antedate such disclosure by virtue of prior invention.

### Definitions

[0080] For convenience, the meaning of certain terms and phrases employed in the specification, examples, and appended claims are provided below. The definitions are not meant to be limiting in nature and serve to provide a clearer understanding of certain aspects of the present invention.

[0081] The term “genome” is intended to include the entire DNA complement of an organism, including the nuclear DNA component, chromosomal or extrachromosomal DNA, as well as the cytoplasmic domain (e.g., mitochondrial DNA).

[0082] The term “gene” refers to a nucleic acid sequence that comprises control and coding sequences necessary for producing a polypeptide or precursor. The polypeptide may be encoded by a full length coding sequence or by any portion of the coding sequence. The gene may be derived in whole or in part from any source known to the art, including a plant, a fungus, an animal, a bacterial genome or episome, eukaryotic, nuclear or plasmid DNA, cDNA, viral DNA, or chemically synthesized DNA. A gene may contain one or more modifications in either the coding or the untranslated regions that could affect the biological activity or the chemical structure of the expression product, the rate of expression, or the manner of expression control. Such modifications include, but are not limited to, mutations, insertions, deletions, and substitutions of one or more nucleotides. The gene may constitute an uninterrupted coding sequence or it may include one or more introns, bound by the appropriate splice junctions.

[0083] The term “gene expression” refers to the process by which a nucleic acid sequence undergoes successful transcription and translation such that detectable levels of the nucleotide sequence are expressed.

[0084] The terms “gene expression profile” or “gene expression signature” refer to a group of genes representing a particular cell or tissue type (e.g., neuron, coronary artery endothelium, or disease tissue).

[0085] The term “nucleic acid” as used herein, refers to a molecule comprised of one or more nucleotides, i.e., ribonucleotides, deoxyribonucleotides, or both. The term includes monomers and polymers of ribonucleotides and deoxyribonucleotides, with the ribonucleotides and/or deoxyribonucleotides being bound together, in the case of the polymers, via 5′ to 3′ linkages. The ribonucleotide and deoxyribonucleotide polymers may be single or double-stranded. However, linkages may include any of the linkages known in the art including, for example, nucleic acids comprising 5′ to 3′ linkages. The nucleotides may be naturally occurring or may be synthetically produced analogs that are capable of forming base-pair relationships with naturally occurring base pairs. Examples of non-naturally occurring bases that are capable of forming base-pairing relationships include, but are not limited to, aza and deaza pyrimidine analogs, aza and deaza purine analogs, and other heterocyclic base analogs, wherein one or more of the carbon and nitrogen atoms of the pyrimidine rings have been substituted by heteroatoms, e.g., oxygen, sulfur, selenium, phosphorus, and the like. Furthermore, the term “nucleic acid sequences” contemplates the complementary sequence and specifically includes any nucleic acid sequence that is substantially homologous to the both the nucleic acid sequence and its complement.

[0086] The term “homology”, as used herein, refers to a degree of complementarity. There may be partial homology or complete homology (i.e., identity). A partially complementary sequence is one that at least partially inhibits an identical sequence from hybridizing to a target nucleic acid; it is referred to using the functional term “substantially homologous.”The inhibition of hybridization of the completely complementary sequence to the target sequence may be examined using a hybridization assay (Southern or northern blot, solution hybridization and the like) under conditions of low stringency. A substantially homologous sequence or probe will compete for and inhibit the binding (i.e., the hybridization) of a completely homologous sequence or probe to the target sequence under conditions of low stringency. This is not to say that conditions of low stringency are such that non-specific binding is permitted; low stringency conditions require that the binding of two sequences to one another be a specific (i.e., selective) interaction. The absence of non-specific binding may be tested by the use of a second target sequence which lacks even a partial degree of complementarity (e.g., less than about 30% identity); in the absence of non-specific binding, the probe will not hybridize to the second non-complementary target sequence.

[0087] The term “oligonucleotide” as used herein refers to a nucleic acid molecule comprising, for example, from about 10 to about 1000 nucleotides. Oligonucleotides for use in the present invention are preferably from about 15 to about 150 nucleotides, more preferably from about 150 to about 1000 in length. The oligonucleotide may be a naturally occurring oligonucleotide or a synthetic oligonucleotide. Oligonucleotides may be prepared by the phosphoramidite method (Beaucage and Carruthers, 22 TETRAHEDRON LETT. 1859-62 (1981)), or by the triester method (Matteucci et al., 103 J. AM. CHEM. SOC. 3185 (1981)), or by other chemical methods known in the art.

[0088] The terms “modified oligonucleotide” and “modified polynucleotide” as used herein refer to oligonucleotides or polynucleotides with one or more chemical modifications at the molecular level of the natural molecular structures of all or any of the bases, sugar moieties, internucleoside phosphate linkages, as well as to molecules having added substitutions or a combination of modifications at these sites. The internucleoside phosphate linkages may be phosphodiester, phosphotriester, phosphoramidate, siloxane, carbonate, carboxymethylester, acetamidate, carbamate, thioether, bridged phosphoramidate, bridged methylene phosphonate, phosphorothioate, methylphosphonate, phosphorodithioate, bridged phosphorothioate or sulfone internucleotide linkages, or 3′-3′, 5′-3′, or 5′-5′ linkages, and combinations of such similar linkages. The phosphodiester linkage may be replaced with a substitute linkage, such as phosphorothioate, methylamino, methylphosphonate, phosphoramidate, and guanidine, and the ribose subunit of the nucleic acids may also be substituted (e.g., hexose phosphodiester; peptide nucleic acids). The modifications may be internal (single or repeated) or at the end(s) of the oligonucleotide molecule, and may include additions to the molecule of the internucleoside phosphate linkages, such as deoxyribose and phosphate modifications which cleave or crosslink to the opposite chains or to associated enzymes or other proteins. The terms “modified oligonucleotides” and “modified polynucleotides” also include oligonucleotides or polynucleotides comprising modifications to the sugar moieties (e.g., 3′-substituted ribonucleotides or deoxyribonucleotide monomers), any of which are bound together via 5′ to 3′ linkages.

[0089] “Biomolecular sequence,” as used herein, is a term that refers to all or a portion of a gene or nucleic acid sequence. A biomolecular sequence may also refer to all or a portion of an amino acid sequence.

[0090] The terms “array” and “microarray” refer to the type of genes or proteins represented on an array by oligonucleotides or protein-capture agents, and where the type of genes or proteins represented on the array is dependent on the intended purpose of the array (e.g., to monitor expression of human genes or proteins). The oligonucleotides or protein-capture agents on a given array may correspond to the same type, category, or group of genes or proteins. Genes or proteins may be considered to be of the same type if they share some common characteristics such as species of origin (e.g., human, mouse, rat); disease state (e.g., cancer); functions (e.g., protein kinases;, tumor suppressors); same biological process (e.g., apoptosis, signal transduction, cell cycle regulation, proliferation, differentiation). For example, one array type may be a “cancer array” in which each of the array oligonucleotides or protein-capture agents correspond to a gene or protein associated with a cancer. An “epithelial array” may be an array of oligonucleotides or protein-capture agents corresponding to unique epithelial genes or proteins. Similarly, a “cell cycle array” may be an array type in which the oligonucleotides or protein-capture agents correspond to unique genes or proteins associated with the cell cycle.

[0091] The term “cell type” refers to a cell from a given source (e.g., a tissue, organ) or a cell in a given state of differentiation, or a cell associated with a given pathology or genetic makeup.

[0092] The term “activation” as used herein refers to any alteration of a signaling pathway or biological response including, for example, increases above basal levels, restoration to basal levels from an inhibited state, and stimulation of the pathway above basal levels.

[0093] The term “differential expression” refers to both quantitative as well as qualitative differences in the temporal and tissue expression patterns of a gene or a protein. For example, a differentially expressed gene may have its expression activated or completely inactivated in normal versus disease conditions. Such a qualitatively regulated gene may exhibit an expression pattern within a given tissue or cell type that is detectable in either control or disease conditions, but is not detectable in both. Differentially expressed genes may represent “high information density genes,” “profile genes,” or “target genes.”

[0094] Similarly, a differentially expressed protein may have its expression activated or completely inactivated in normal versus disease conditions. Such a qualitatively regulated protein may exhibit an expression pattern within a given tissue or cell type that is detectable in either control or disease conditions, but is not detectable in both. Morever, differntialy expressed genes may represent “high information density proteins,” “profile proteins,” or “target proteins.”

[0095] The term “detectable” refers to an RNA expression pattern which is detectable via the standard techniques of polymerase chain reaction (PCR), reverse transcriptase-(RT) PCR, differential display, and Northern analyses, which are well known to those of skill in the art. Similarly, protein expression patterns may be “detected” via standard techniques such as Western blots.

[0096] The term “high information density” refers to a gene or protein whose expression pattern may be used as a predictor or diagnostic, may be used in methods for identifying therapeutic compounds, drug or toxicity screening, or identifying cellular signal pathways or co-regulated genes. Identification of high information density genes or proteins is accomplished by assessing the information content of one or more genes or proteins comprising one or more gene or protein expression profiles. Genes or proteins providing the highest amount of information content comprise high information density genes or proteins. High information density genes may also be referred to as “predictor genes.” Similarly, high information density proteins may be referred to as “predictor proteins.”

[0097] The term “information content” refers to the value assigned to a particular gene or protein based on quantitative and qualitative expression under selected conditions. Information content may be derived by measuring one or more parameters of gene or protein expression including, but not limited to, the cell type in which the gene or protein is expressed, the magnitude of response over time, and response to chemical or physical stimuli. Algorithms may be used in assessing the information content provided by particular genes or proteins.

[0098] A “target gene” refers to a nucleic acid, often derived from a biological sample, to which an oligonucleotide probe is designed to specifically hybridize. It is either the presence or absence of the target nucleic acid that is to be detected, or the amount of the target nucleic acid that is to be quantified. The target nucleic acid has a sequence that is complementary to the nucleic acid sequence of the corresponding probe directed to the target. The target nucleic acid may also refer to the specific subsequence of a larger nucleic acid to which the probe is directed or to the overall sequence (e.g., gene or mRNA) whose expression level it is desired to detect.

[0099] A “target protein” refers to an amino acid or protein, often derived from a biological sample, to which a protein-capture agent specifically hybridizes or binds. It is either the presence or absence of the target protein that is to be detected, or the amount of the target protein that is to be quantified. The target protein has a structure that is recognized by the corresponding protein-capture agent directed to the target. The target protein or amino acid may also refer to the specific substructure of a larger protein to which the protein-capture agent is directed or to the overall structure (e.g., gene or mRNA) whose expression level it is desired to detect.

[0100] The term “complementary” refers to the topological compatibility or matching together of the interacting surfaces of a probe molecule and its target. The target and its probe can be described as complementary, and furthermore, the contact surface characteristics are complementary to each other. Hybridization or base pairing between nucleotides or nucleic acids, such as, for example, between the two strands of a double-stranded DNA molecule or between an oligonucleotide probe and a target are complementary.

[0101] The term “hybridization” refers to the binding, duplexing, or hybridizing of a nucleic acid molecule to a particular nucleic acid sequence under stringent conditions. Hybridization may also refer to the binding of a protein-capture agent to a target protein under certain conditions, such as normal physiological conditions.

[0102] The term “stringent conditions” refers to conditions under which a probe may hybridize to its target nucleic acid sequence, but to no other sequences. Stringent conditions are sequence-dependent (e.g., longer sequences hybridize specifically at higher temperatures). Generally, stringent conditions are selected to be about 5° C. lower than the thermal melting point (Tₘ) for the specific sequence at a defined ionic strength and pH. The Tₘ is the temperature (under defined ionic strength, pH, and nucleic acid concentration) at which 50% of the probes complementary to the target sequence hybridize to the target sequence at equilibrium. Typically, stringent conditions will be those in which the salt concentration is at least about 0.01 to about 1.0 M sodium ion concentration (or other salts) at about pH 7.0 to about pH 8.3 and the temperature is at least about 30° C. for short probes (e.g., 10 to 50 nucleotides). Stringent conditions may also be achieved with the addition of destabilizing agents such as formamide.

[0103] The term “label” refers to agents that are capable of providing a detectable signal, either directly or through interaction with one or more additional members of a signal producing system. Labels that are directly detectable and may find use in the present invention include: fluorescent labels, where the wavelength of light absorbed by the fluorophore may generally range from about 300 to about 900 nm, usually from about 400 to about 800 nm, and where the absorbance maximum may typically occur at a wavelength ranging from about 500 to about 800 nm. Specific fluorophores for use in singly labeled primers include: fluorescein, rhodamine, BODIPY, cyanine dyes and the like. Radioactive isotopes, such as ³⁵S, ³²P, ³H, and the like may also be utilized as labels. Examples of labels that provide a detectable signal through interaction with one or more additional members of a signal producing system include capture moieties that specifically bind to complementary binding pair members, where the complementary binding pair members comprise a directly detectable label moiety, such as a fluorescent moiety as described above. The label should be such that it does not provide a variable signal, but instead provides a constant and reproducible signal over a given period of time. Capture moieties of interest include ligands (e.g., biotin) where the other member of the signal producing system could be fluorescently labeled streptavidin, and the like. The target molecules may be end-labeled, i.e., the label moiety is present at a region at least proximal to, and preferably at, the 5′ terminus of the target.

[0104] The term “oligonucleotide probe” refers to a surface-immobilized oligonucleotide that may be recognized by a particular target. Depending on context, the term “oligonucleotide probes” refers both to individual oligonucleotide molecules and to the collection of oligonucleotide molecules immobilized at a discrete location. Generally, the probe is capable of binding to a target nucleic acid of complementary sequence through one or more types of chemical bonds, usually through complementary base pairing via hydrogen bond formation. As used herein, an oligonucleotide probe may include natural (e.g., A, G, C, or T) or modified bases (e.g., 7-deazaguanosine, inosine). In addition, the bases in an oligonucleotide probe may be joined by a linkage other than a phosphodiester bond, so long as it does not interfere with hybridization. Thus, oligonucleotide probes may be peptide nucleic acids in which the constituent bases are joined by peptide bonds rather than phosphodiester linkages.

[0105] The term “protecting group” as used herein, refers to any of the groups which are designed to block one reactive site in a molecule while a chemical reaction is carried out at another reactive site. The proper selection of protecting groups for a particular synthesis may be governed by the overall methods employed in the synthesis. For example, in photolithography synthesis, discussed below, the protecting groups are photolabile protecting groups such as NVOC and MeNPOC. In other methods, protecting groups may be removed by chemical methods and include groups such as FMOC, DMT, and others known to those of skill in the art.

[0106] The term “support” or “substrate” refers to material having a rigid or semi-rigid surface. Such materials may take the form of plates or slides, small beads, pellets, disks or other convenient forms, although other forms may be used. In some embodiments, at least one surface of the substrate will be substantially flat. In other embodiments, a roughly spherical shape may be preferred. In the microarrays of the present invention, the oligonucleotide probes or protein-capture agents (defined below) may be stably associated with the surface of a rigid support, i.e., the probes maintain their position relative to the rigid support under hybridization and washing conditions. As such, the oligonucleotide probes or protein-capture agents may be non-covalently or covalently associated with the support surface. Examples of non-covalent association include non-specific adsorption, specific binding through a specific binding pair member covalently attached to the support surface, and entrapment in a support material (e.g., a hydrated or dried separation medium) which presents the oligonucleotide probe or protein-capture agent in a manner sufficient for hybridization to occur. Examples of covalent binding include covalent bonds formed between the oligonucleotide probe or protein-capture agent and a functional group present on the surface of the rigid support (e.g., —OH) where the functional group may be naturally occurring or present as a member of an introduced linking group.

[0107] As mentioned above, the microarray may be present on a rigid substrate. By rigid, the support is solid and preferably does not readily bend. As such, the rigid substrates of the microarrays are sufficient to provide physical support and structure to the oligonucleotide probes or protein-capture agents present thereon under the assay conditions in which the microarray is utilized, particularly under high-throughput handling conditions.

[0108] The term “spatially directed oligonucleotide synthesis” refers to any method of directing the synthesis of an oligonucleotide to a specific location on a substrate.

[0109] The term “background” refers to hybridization signals resulting from non-specific binding, or other interactions, between the labeled target nucleic acids and components of the oligonucleotide microarray (e.g., the oligonucleotide probes, control probes, the array substrate) or between target proteins and the protein-capture agents of a protein microarray. Background signals may also be produced by intrinsic fluorescence of the microarray components themselves. A single background signal may be calculated for the entire array, or a different background signal may be calculated for each target nucleic acid or target protein. The background may be calculated as the average hybridization signal intensity, or where a different background signal is calculated for each target gene or target protein. Alternatively, background may be calculated as the average hybridization signal intensity produced by hybridization to probes that are not complementary to any sequence found in the sample (e.g., probes directed to nucleic acids of the opposite sense or to genes not found in the sample such as bacterial genes where the sample is mammalian nucleic acids). The background can also be calculated as the average signal intensity produced by regions of the array which lack any probes or protein-capture agents at all.

[0110] The term “cluster” refers to a group of nucleic acid sequences or amino acid sequences related to one another by sequence homology. In one example, clusters are formed based upon a specified degree of homology and/or overlap (e.g., stringency). “Clustering” may be performed with the nucleic acid or amino acid sequence data. For instance, a sequence thought to be associated with a particular molecular or biological function in one tissue might be compared against another library or database of sequences. This type of search is useful to look for homologous, and presumably functionally related, sequences in other tissues or samples, and may be used to streamline the methods of the present invention in that clustering may be used within one or more of the databases to cluster biomolecular sequences prior to performing methods of the invention. The sequences showing sufficient homology with the representative sequence are considered part of a “cluster.” Such “sufficient” homology may vary within the needs of one skilled in the art.

[0111] The term “linker” refers to a moiety, molecule, or group of molecules attached to a solid support, and spacing an oligonucleotide or other nucleic acid fragment from the solid support.

[0112] The term “bead” refers to solid supports for use with the present invention. Such beads may have a wide variety of forms, including microparticles, beads, and membranes, slides, plates, micromachined chips, and the like. Likewise, solid supports of the invention may comprise a wide variety of compositions, including glass, plastic, silicon, alkanethiolate-derivatized gold, cellulose, low crosslinked and high crosslinked polystyrene, silica gel, polyamide, and the like. Other materials and shapes may be used, including pellets, disks, capillaries, hollow fibers, needles, solid fibers, cellulose beads, pore-glass beads, silica gels, polystyrene beads optionally crosslinked with divinylbenzene, grafted co-poly beads, poly-acrylamide beads, latex beads, dimethylacrylamide beads optionally crosslinked with N,N-bis-acryloyl ethylene diamine, and glass particles coated with a hydrophobic polymer.

[0113] The term “biological sample” refers to a sample obtained from an organism (e.g., patient) or from components (e.g., cells) of an organism. The sample may be of any biological tissue or fluid. The sample may be a “clinical sample” which is a sample derived from a patient. Such samples include, but are not limited to, sputum, blood, blood cells (e.g., white cells), amniotic fluid, plasma, semen, bone marrow, and tissue or fine needle biopsy samples, urine, peritoneal fluid, and pleural fluid, or cells therefrom. Biological samples may also include sections of tissues such as frozen sections taken for histological purposes. A biological sample may also be referred to as a “patient sample.”

[0114] “Proteomics” is the study of or the characterization of either the proteome or some fraction of the proteome. The “proteome” is the total collection of the intracellular proteins of a cell or population of cells and the proteins secreted by the cell or population of cells. This characterization includes measurements of the presence, and usually quantity, of the proteins that have been expressed by a cell. The function, structural characteristics (such as post-translational modification), and location within the cell of the proteins may also be studied. “Functional proteomics” refers to the study of the functional characteristics, activity level, and structural characteristics of the protein expression products of a cell or population of cells.

[0115] A “protein” means a polymer of amino acid residues linked together by peptide bonds. The term, as used herein, refers to proteins, polypeptides, and peptides of any size, structure, or function. Typically, however, a protein will be at least six amino acids long. If the protein is a short peptide, it will be at least about 10 amino acid residues long. A protein may be naturally occurring, recombinant, or synthetic, or any combination of these. A protein may also comprise a fragment of a naturally occurring protein or peptide. A protein may be a single molecule or may be a multi-molecular complex. The term protein may also apply to amino acid polymers in which one or more amino acid residues is an artificial chemical analogue of a corresponding naturally occurring amino acid.

[0116] A “fragment of a protein,” as used herein, refers to a protein that is a portion of another protein. For example, fragments of proteins may comprise polypeptides obtained by digesting full-length protein isolated from cultured cells. In one embodiment, a protein fragment comprises at least about six amino acids. In another embodiment, the fragment comprises at least about ten amino acids. In yet another embodiment, the protein fragment comprises at least about 16 amino acids.

[0117] As used herein, an “expression product” is a biomolecule, such as a protein, which is produced when a gene in an organism is expressed. An expression product may comprise post-translational modifications.

[0118] The term “protein expression” refers to the process by which a nucleic acid sequence undergoes successful transcription and translation such that detectable levels of the amino acid sequence or protein are expressed.

[0119] The terms “protein expression profile” or “protein expression signature” refer to a group of proteins representing a particular cell or tissue type (e.g., neuron, coronary artery endothelium, or disease tissue).

[0120] The term “protein-capture agent,” as used herein, refers to a molecule or a multimolecular complex that can bind a protein to itself. In one embodiment, protein-capture agents bind their binding partners in a substantially specific manner. In one embodiment, protein-capture agents may exhibit a dissociation constant (K_{D}) of less than about 10⁻⁶. The protein-capture agent may comprise a biomolecule such as a protein or a polynucleotide. The biomolecule may further comprise a naturally occurring, recombinant, or synthetic biomolecule. Examples of protein-capture agents include antibodies, antigens, receptors, or other proteins, or portions or fragments thereof. Furthermore, protein-capture agents are understood not to be limited to agents that only interact with their binding partners through noncovalent interactions. Rather, protein-capture agents may also become covalently attached to the proteins with which they bind. For example, the protein-capture agent may be photocrosslinked to its binding partner following binding.

[0121] A “region of protein-capture agents” is a term that refers to a discrete area of immobilized protein-capture agents on the surface of a substrate. The regions may be of any geometric shape or may be irregularly shaped.

[0122] As used herein, the term “binding partner” refers to a protein that may bind to a particular protein-capture agent. In one embodiment, the binding partner binds a protein-capture agent in a substantially specific manner. In some cases, the protein-capture agent may be a cellular or extracellular protein and the binding partner may be the entity normally bound in vivo. In other embodiments, however, the binding partner may be the protein or peptide on which the protein-capture agent was selected (through in vitro or in vivo selection) or raised (as in the case of antibodies). A binding partner may be shared by more than one protein-capture agent. For example, a binding partner that is bound by a variety of polyclonal antibodies may bear a number of different epitopes. One protein-capture agent may also bind to a multitude of binding partners, for example, if the binding partners share the same epitope.

[0123] A “population of cells in an organism” means a collection of more than one cell in a single organism or more than one cell originally derived from a single organism. The cells in the collection are preferably all of the same type. They may all be from the same tissue in an organism, for example. Most preferably, gene expression in all of the cells in the population is identical or nearly identical.

[0124] “Conditions suitable for protein binding” means those conditions (in terms of salt concentration, pH, detergent, protein concentration, temperature, etc.) that allow for binding to occur between an immobilized protein-capture agent and its binding partner in solution. Preferably, the conditions are not so lenient that a significant amount of nonspecific protein binding occurs.

[0125] A “small molecule” comprises a compound or molecular complex, either synthetic, naturally derived, or partially synthetic, composed of carbon, hydrogen, oxygen, and nitrogen, which may also contain other elements, and which may have a molecular weight of less than about 5,000, and in a specific embodiment between about 100 and about 1,500.

[0126] The term “antibody” means an immunoglobulin, whether natural or partially or wholly synthetically produced. All derivatives thereof that maintain specific binding ability are also included in the term. The term also covers any protein having a binding domain that is homologous or largely homologous to an immunoglobulin binding domain. An antibody may be monoclonal or polyclonal. The antibody may be a member of any immunoglobulin class, including any of the human classes: IgG, IgM, IgA, IgD, and IgE.

[0127] The term “antibody fragment” refers to any derivative of an antibody that is less than full-length. In one aspect, the antibody fragment retains at least a significant portion of the full-length antibody's specific binding ability, specifically, as a binding partner. Examples of antibody fragments include, but are not limited to, Fab, Fab′, F(ab′)₂, scFv, Fv, dsFv diabody, and Fd fragments. The antibody fragment may be produced by any means. For example, the antibody fragment may be enzymatically or chemically produced by fragmentation of an intact antibody or it may be recombinantly produced from a gene encoding the partial antibody sequence. Alternatively, the antibody fragment may be wholly or partially synthetically produced. The antibody fragment may comprise a single chain antibody fragment. In another embodiment, the fragment may comprise multiple chains that are linked together, for example, by disulfide linkages. The fragment may also comprise a multimolecular complex. A functional antibody fragment may typically comprise at least about 50 amino acids and more typically will comprise at least about 200 amino acids.

[0128] As used herein, single-chain Fvs (scFvs) refer to recombinant antibody fragments, consisting of the variable light chain (V_{L}) and variable heavy chain (V_{H}) covalently connected to one another by a polypeptide linker. Either V_{L} or V_{H} may be the NH₂-terminal domain. The polypeptide linker may be of variable length and composition so long as the two variable domains are bridged without serious steric interference. Typically, the linkers are comprised primarily of stretches of glycine and serine residues with some glutamic acid or lysine residues interspersed for solubility.

[0129] “Diabodies” refer to dimeric scFvs. The components of diabodies generally have shorter peptide linkers than most scFvs and they show a preference for associating as dimers.

[0130] An “Fv” fragment consists of one V_{H} and one V_{L} domain held together by noncovalent interactions. The term “dsFv” is used herein to refer to an Fv with an engineered intermolecular disulfide bond to stabilize the V_{H}-V_{L} pair.

[0131] The term “F(ab′)₂” fragment refers to an antibody fragment essentially equivalent to that obtained from immunoglobulins by digestion with an enzyme pepsin at pH 4.0-4.5. The fragment may be recombinantly produced.

[0132] A “Fab” fragment is an antibody fragment essentially equivalent to that obtained by reduction of the disulfide bridge or bridges joining the two heavy chain pieces in the F(ab′)₂ fragment. The Fab′ fragment may be recombinantly produced.

[0133] A “Fab” fragment is an antibody fragment essentially equivalent to that obtained by digestion of immunoglobulins with the enzyme papain. The Fab fragment may be recombinantly produced. The heavy chain segment of the Fab fragment is the Fd piece.

[0134] The term “coating” means a layer that is either naturally or synthetically formed on or applied to the surface of the substrate. For example, the exposure of a substrate, such as silicon, to air results in oxidation of the exposed surface. In the case of a substrate made of silicon, a silicon oxide coating is formed on the surface upon exposure to air. In other instances, the coating is not derived from the substrate and may be placed upon the surface via mechanical, physical, electrical, or chemical means. An example of this type of coating would be a metal coating that is applied to a silicon or polymeric substrate or a silicon nitride coating that is applied to a silicon substrate. Although a coating may be of any thickness, typically the coating has a thickness smaller than that of the substrate.

[0135] An “interlayer” or “adhesion layer” refers to an additional coating or layer that is positioned between the first coating and the substrate. Multiple interlayers may be used together. The primary purpose of a typical interlayer is to facilitate adhesion between the first coating and the substrate. One such example is the use of a titanium or chromium interlayer to help adhere a gold coating to a silicon or glass surface. However, other possible functions of an interlayer are also contemplated. For example, some interlayers may perform a role in the detection system of the microarray, such as a semiconductor or metal layer between a nonconductive substrate and a nonconductive coating.

[0136] An “organic thinfilm” is a thin layer of organic molecules that has been applied to a substrate or to a coating on a substrate if present. An organic thinfilm may be less than about 20 nm thick. Alternatively, an organic thinfilm may be less than about 10 nm thick. An organic thinfilm may be disordered or ordered. For example, an organic thinfilm can be amorphous (such as a chemisorbed or spin-coated polymer) or highly organized (such as a Langmuir-Blodgett film or self-assembled monolayer). An organic thinfilm may be heterogeneous or homogeneous. In one embodiment, the organic thinfilm is a monolayer. In another embodiment, the organic thinfilm comprises a lipid bilayer. In other embodiments, the organic thinfilm may comprise a combination of more than one form of organic thinfilm. For example, an organic thinfilm may comprise a lipid bilayer on top of a self-assembled monolayer. A hydrogel may also compose an organic thinfilm. The organic thinfilm may have functionalities exposed on its surface that serve to enhance the surface conditions of a substrate or the coating on a substrate in any of a number of ways. For example, exposed functionalities of the organic thinfilm may be useful in the binding or covalent immobilization of the protein-capture agents to the regions of the protein microarray. Alternatively, the organic thinfilm may bear functional groups, such as polyethylene glycol (PEG), which reduce the non-specific binding of molecules to the surface. Other exposed functionalities serve to tether the thinfilm to the surface of the substrate or the coating. Particular functionalities of the organic thinfilm may also be designed to enable certain detection techniques to be used with the surface. Alternatively, the organic thinfilm may serve the purpose of preventing inactivation of a protein-capture agent or the protein binding partner to be bound by a protein-capture agent from occurring upon contact with the surface of a substrate or a coating on the surface of a substrate.

[0137] A “monolayer” is a single-molecule thick organic thinfilm. A monolayer may be disordered or ordered. A monolayer may be a polymeric compound, such as a polynonionic polymer, a polyionic polymer, or a block-copolymer. For example, the monolayer may comprise a poly amino acid such as polylysine. In another embodiment, the monolayer may be a self-assembled monolayer. One face of the self-assembled monolayer may comprise chemical functionalities on the termini of the organic molecules that are chemisorbed or physisorbed onto the surface of the substrate or, if present, the coating on the substrate. Examples of suitable functionalities of monolayers include the positively charged amino groups of poly-L-lysine for use on negatively charged surfaces and thiols for use on gold surfaces. Generally, the other face of the self-assembled monolayer is exposed and may bear any number of chemical functionalities or end groups.

[0138] A “self-assembled monolayer” is a monolayer that is created by the spontaneous assembly of molecules. The self-assembled monolayer may be ordered, disordered, or exhibit short- to long-range order.

[0139] An “affinity tag” is a functional moiety capable of directly or indirectly immobilizing a protein-capture agent onto a substrate surface or an exposed functionality of an organic thinfilm covering the substrate surface. In one embodiment, the affinity tag enables the site-specific immobilization and thus enhances orientation of the protein-capture agent onto the organic thinfilm. In some cases, the affinity tag may be a simple chemical functional group. Other possibilities include amino acids, poly amino acids tags, or full-length proteins. Still other possibilities include carbohydrates and nucleic acids. For example, the affinity tag may be a polynucleotide that hybridizes to another polynucleotide serving as a functional group on the organic thinfilm or another polynucleotide serving as an adaptor. The affinity tag may also be a synthetic chemical moiety. If the organic thinfilm of each of the regions of protein-capture agents comprises a lipid bilayer or monolayer, then a membrane anchor is a suitable affinity tag. The affinity tag may be covalently or noncovalently attached to the protein-capture agent. For example, if the affinity tag is covalently attached to the protein-capture agent it may be attached via chemical conjugation or as a fusion protein. The affinity tag may also be attached to the protein-capture agent via a cleavable linkage. Alternatively, the affinity tag may not be directly in contact with the protein-capture agent. Rather, the affinity tag may be separated from the protein-capture agent by an adaptor. The affinity tag may immobilize the protein-capture agent to the organic thinfilm either through noncovalent interactions or through a covalent linkage.

[0140] An “adaptor,” for purposes of this invention, is any entity that links an affinity tag to the protein-capture agent. The adaptor may be, but is not limited to, a discrete molecule that is noncovalently attached to both the affinity tag and the protein-capture agent. The adaptor may be covalently attached to the affinity tag or the protein-capture agent or both, via chemical conjugation or as a fusion protein. Full-length proteins, polypeptides, or peptides may base used as adaptors. Other possible adaptors include carbohydrates or nucleic acids.

[0141] The term “fusion protein” refers to a protein composed of two or more polypeptides that, although typically not joined in their native state, are joined by their respective amino and carboxyl termini through a peptide linkage to form a single continuous polypeptide. It is understood that the two or more polypeptide components can either be directly joined or indirectly joined through a peptide linker/spacer.

[0142] The term “normal physiological conditions” means conditions that are typical inside a living organism or a cell. Although some organs or organisms provide extreme conditions, the intra-organismal and intra-cellular environment normally varies around pH 7 (i.e., from pH 6.5 to pH 7.5), contains water as the predominant solvent, and exists at a temperature above 0° C. and below 50° C. The concentration of various salts depends on the organ, organism, cell, or cellular compartment used as a reference.

[0143] I. Nucleic Acid Microarrays

[0144] Microarray technology provides the opportunity to analyze a large number of nucleic acid sequences. This technology may also be utilized for comparative gene expression analysis, drug discovery, and characterization of molecular interactions. With respect to expression analysis, the expression pattern of a particular gene may be used to characterize the function of that gene. In addition, microarrays may be utilized to analyze both the static expression of a gene (e.g., expression in a specific tissue) as well as, dynamic expression of a particular gene (e.g., expression of one gene relative to the expression of other genes) (Duggan et al., 21 NATURE GENET. 10-14 (1999)).

[0145] An advantage of the microarray technology is the use of an impermeable, rigid support as compared to the porous membranes used in the traditional blotting methods (e.g., Northern and Southern analyses). Hybridization buffers do not penetrate the support resulting in greater access to the oligonucleotide probes, enhanced rates of hybridization, and improved reproducibility. In addition, the microarray technology provides better image acquisition and image processing (Southern et al., 21 NATURE GENET. 5-9 (1999)). For microarray analysis, nucleic acids (e.g., RNA) may be isolated from a biological sample. Nucleic acid samples include, but are not limited to, mRNA transcripts of the gene or genes, cDNA reverse transcribed from the mRNA, cRNA transcribed from the cDNA, DNA amplified from the genes, RNA transcribed from amplified DNA, and the like.

[0146] A. Methods for Producing Nucleic Acid Microarrays

[0147] The microarrays may be produced through spatially directed oligonucleotide synthesis. Methods for spatially directed oligonucleotide synthesis include, without limitation, light-directed oligonucleotide synthesis, microlithography, application by ink jet, microchannel deposition to specific locations and sequestration with physical barriers. In general, these methods involve generating active sites, usually by removing protective groups, and coupling to the active site a nucleotide that, itself, optionally has a protected active site if further nucleotide coupling is desired.

[0148] A microarray may be configured, for example, by in situ synthesis or by direct deposition (“spotting” or “printing”) of synthesized oligonucleotide probes onto the support. The oligonucleotide probes are used to detect complementary nucleic acid sequences in a target sample of interest. In situ synthesis has several advantages over direct placement such as higher yields, consistency, efficiency, cost, and potential use of combinatorial strategies (Southern et al. (1999)). However, for longer nucleic acid sequences such as PCR products, deposition may be the preferred method. Generation of microarrays by in situ synthesis may be accomplished by a number of methods including photochemical deprotection, ink-jet delivery, and flooding channels (Lipshutz et al., 21 NATURE GENET. 20-24 (1999); Blanchard et al., 11 BIOSENSORS AND BIOELECTRONICS, 687-90 (1996); Maskos et al., 21 NUCLEIC ACIDS RES. 4663-69 (1993)).

[0149] The present invention relates to the construction of microarrays by the in situ synthesis method using solid-phase DNA synthesis and photolithography (Lipshutz et al. (1999)). Linkers with photolabile protecting groups may be covalently or non-covalently attached to a support (e.g., glass). Light is then directed through a photolithographic screen to specific areas on the support resulting in localized photodeprotection and yielding reactive hydroxyl groups in the illuminated regions. A 3′-O-phosphoramidite-activated deoxynucleoside (protected at the 5′-hydroxyl with a photolabile group) is then incubated with the support and coupling occurs at deprotected sites that were exposed to light. Following the optional capping of unreacted active sites and oxidation, the substrate is rinsed and the surface is illuminated through a second screen, to expose additional hydroxyl groups for coupling to the linker. A second 5′-protected, 3′-O-phosphoramidite-activated deoxynucleoside is presented to the support. The selective photodeprotection and coupling cycles are repeated until the desired products are obtained. Photolabile groups may then be removed and the sequence may be capped. Side chain protective groups may also be removed. Because photolithography is used, the process may be miniaturized to generate high-density microarrays of oligonucleotide probes. Thus, thousands to hundreds of thousands of arbitrary oligonucleotide probes may be generated on a single microarray support using this technology.

[0150] To produce a microarray by the spotting method, oligonucleotide probes are prepared, generally by PCR, for printing onto the microarray support. As described for the in situ technique, the probes may be selected from a number of sources including nucleic acid databases such as GenBank, Unigen, HomoloGene, RefSeq, dbEST, and dbSNP (Wheeler et al., 29 NUCLEIC ACIDS RES. 11-16 (2001)). In addition, oligonucleotide probes may be randomly selected from cDNA libraries reflecting, for example, a tissue type (e.g., cardiac or neuronal tissue), or a genomic library representing a species of interest (e.g., Drosophilia melanogaster). If PCR is used to generate the probes, for example, approximately 100-500 pg of the purified PCR product (about 0.6-2.4 kb) may be spotted onto the support (Duggan et al., 1999). The spotting (or printing) may be performed by a robotic arrayer (see, e.g., U.S. Pat. Nos. 6,150,147; 5,968,740; 5,856,101; 5,474,796; and 5,445,934;).

[0151] A number of different microarray configurations and methods for their production are known to those of skill in the art and are disclosed in U.S. Pat. Nos. 6,156,501; 6,077,674; 6,022,963; 5,919,523; 5,885,837; 5,874,219; 5,856,101; 5,837,832; 5,770,722; 5,770,456; 5,744,305; 5,700,637; 5,624,711; 5,593,839; 5,571,639; 5,556,752; 5,561,071; 5,554,501; 5,545,531; 5,529,756; 5,527,681; 5,472,672; 5,445,934; 5,436,327; 5,429,807; 5,424,186; 5,412,087; 5,405,783; 5,384,261; 5,242,974; and the disclosures of which are herein incorporated by reference. Patents describing methods of using arrays in various applications include: U.S. Pat. Nos. 5,874,219; 5,848,659; 5,661,028; 5,580,732; 5,547,839; 5,525,464; 5,510,270; 5,503,980; 5,492,806; 5,470,710; 5,432,049; 5,324,633; 5,288,644; 5,143,854; and the disclosures of which are incorporated herein by reference.

[0152] B. Microarray Supports

[0153] A microarray support may comprise a flexible or rigid substrate. A flexible substrate is capable of being bent, folded, or similarly manipulated without breakage. Examples of solid materials that are flexible solid supports with respect to the present invention include membranes, such as nylon and flexible plastic films. The rigid supports of microarrays are sufficient to provide physical support and structure to the associated oligonucleotides under the appropriate assay conditions.

[0154] The support may be biological, nonbiological, organic, inorganic, or a combination of any of these, existing as particles, strands, precipitates, gels, sheets, tubing, spheres, containers, capillaries, pads, slices, films, plates, or slides. In addition, the support may have any convenient shape, such as a disc, square, sphere, or circle. In one embodiment, the support is flat but may take on a variety of alternative surface configurations. For example, the support may contain raised or depressed regions on which the synthesis takes place. The support and its surface may form a rigid support on which the reactions described herein may be carried out. The support and its surface may also be chosen to provide appropriate light-absorbing characteristics. For example, the support may be a polymerized Langmuir Blodgett film, functionalized glass, Si, Ge, GaAs, GaP, SiO₂, SIN₄, modified silicon, or any one of a wide variety of gels or polymers such as (poly)tetrafluoroethylene, (poly)vinylidenedifluoride, polystyrene, polycarbonate, or combinations thereof. The surface of the support may also contain reactive groups, such as carboxyl, amino, hydroxyl, and thiol groups. The surface may be transparent and contain SiOH functional groups, such as found on silica surfaces.

[0155] The support may be composed of a number of materials including glass. There are several advantages for utilizing glass supports in constructing a microarray. For example, microarrays prepared using a glass support, generally utilize microscope slides due to the low inherent fluorescence, thus, minimizing background noise. Moreover, hundreds to thousands of oligonucleotide probes may be attached to slide. The glass slides may be coated with polylysine, amino silanes, or amino-reactive silanes that enhance the hydrophobicity of the slide and improve the adherence of the oligonucleotides (Duggan et al. (1999)). Ultraviolet irradiation is used to crosslink the oligonucleotide probes to the glass support. Following irradiation, the support may be treated with succinic anhydride to reduce the positive charge of the amines. For double-stranded oligonucleotides, the support may be subjected to heat (e.g., 95° C.) or alkali treatment to generate single-stranded probes. An additional advantage to using glass is its nonporous nature, thus, requiring a minimal volume of hybridization buffer resulting in enhanced binding of target samples to probes.

[0156] In another embodiment, the support may be flat glass or single-crystal silicon with surface relief features of less than about 10 angstroms. The surface of the support may be etched using well-known techniques to provide desired surface features. For example, trenches, v-grooves, or mesa structures allow the synthesis regions to be more closely placed within the focus point of impinging light.

[0157] The present invention also relates to nucleic acid microarray supports comprising beads. These beads may have a wide variety of shapes and may be composed of numerous materials. Generally, the beads used as supports may have a homogenous size between about 1 and about 100 microns, and may include microparticles made of controlled pore glass (CPG), highly crosslinked polystyrene, acrylic copolymers, cellulose, nylon, dextran, latex, and polyacrolein. See e.g., U.S. Pat. Nos. 6,060,240; 4,678,814; and 4,413,070.

[0158] Several factors may be considered when selecting a bead for a support including material, porosity, size, shape, and linking moiety. Other important factors to be considered in selecting the appropriate support include uniformity, efficiency as a synthesis support, surface area, and optical properties (e.g., autofluoresence). Typically, a population of uniform oligonucleotide or nucleic acid fragment may be employed. However, beads with spatially discrete regions each containing a uniform population of the same oligonucleotide or nucleic acid fragment (and no other), may also be employed. In one embodiment, such regions are spatially discrete so that signals generated by fluorescent emissions at adjacent regions can be resolved by the detection system being employed.

[0159] In general, the support beads may be composed of glass (silica), plastic (synthetic organic polymer), or carbohydrate (sugar polymer). A variety of materials and shapes may be used, including beads, pellets, disks, capillaries, cellulose beads, pore-glass beads, silica gels, polystyrene beads optionally crosslinked with divinylbenzene, grafted co-poly beads, polyacrylamide beads, latex beads, dimethylacrylamide beads optionally cross-linked with N,N-1-bis-acryloyl ethylene diamine, and glass particles coated with a hydrophobic polymer (e.g., a material having a rigid or semirigid surface). The beads may also be chemically derivatized so that they support the initial attachment and extension of nucleotides on their surface.

[0160] Oligonucleotide probes may be synthesized directly on the bead, or the probes may be separately synthesized and attached to the bead. See e.g., Albretsen et al., 189 ANAL. BIOCHEM. 40-50 (1990); Lund et al., 16 NUCLEIC ACIDS RES. 10861-80 (1988); Ghosh et al., 15 NUCLEIC ACIDS RES. 5353-72 (1987); Wolf et al., 15 NUCLEIC ACIDS RES. 2911-26 (1987). The attachment to the bead may be permanent, or a cleavable linker between the bead and the probe may also be used. The link should not interfere with the probe-target binding during screening. Linking moieties for attaching and synthesizing tags on microparticle surfaces are disclosed in U.S. Pat. No. 4,569,774; Beattie et al., 39 CLIN. CHEM. 719-22 (1993); Maskos and Southern, 20 NUCLEIC ACIDS RES. 1679-84 (1992); Damba et al., 18 NUCLEIC ACIDS RES. 3813-21 (1990); and Pon et al., 6 BIOTECHNIQUES 768-75 (1988). Various links may include polyethyleneoxy, saccharide, polyol, esters, amides, saturated or unsaturated alkyl, aryl, and combinations thereof.

[0161] If the oligonucleotide probes are chemically synthesized on the bead, the bead-oligo linkage may be stable during the deprotection step of photolithography. During standard phosphoramidite chemical synthesis of oligonucleotides, a succinyl ester linkage may be used to bridge the 3′ nucleotide to the resin. This linkage may be readily hydrolyzed by NH₃ prior to and during deprotection of the bases. The finished oligonucleotides may be released from the resin in the process of deprotection. The probes may be linked to the beads by a siloxane linkage to Si atoms on the surface of glass beads; a phosphodiester linkage to the phosphate of the 3′-terminal nucleotide via nucleophilic attack by a hydroxyl (typically an alcohol) on the bead surface; or a phosphoramidate linkage between the 3′-terminal nucleotide and a primary amine conjugated to the bead surface.

[0162] Numerous functional groups and reactants may be used to detach the oligonucleotide probes. For example, functional groups present on the bead may include hydroxy, carboxy, iminohalide, amino, thio, active halogen (Cl or Br) or pseudohalogen (e.g., CF₃, CN), carbonyl, silyl, tosyl, mesylates, brosylates, and triflates. In some instances, the bead may have protected functional groups that may be partially or wholly deprotected.

[0163] 1. Microarray Support Surface

[0164] The support of the microarrays may comprise at least one surface on which a pattern of oligonucleotide probes is present, where the surface may be smooth or substantially planar, or have irregularities, such as depressions or elevations. The surface on which the probes are located may be modified with one or more different layers of compounds that serve to modulate the properties of the surface. Such modification layers may generally range in thickness from a monomolecular thickness of about 1 mm, preferably from a monomolecular thickness of about 0.1 mm, and most preferred from a monomolecular thickness of about 0.001 mm. Modification layers include, for example, inorganic and organic layers such as metals, metal oxides, polymers, small organic molecules and the like. Polymeric layers include peptides, proteins, polynucleic acids or mimetics thereof (e.g., peptide nucleic acids), polysaccharides, phospholipids, polyurethanes, polyesters, polycarbonates, polyureas, polyamides, polyethyleneamines, polyarylene sulfides, polysiloxanes, polyimides, and polyacetates. The polymers may be hetero- or homopolymeric, and may or may not have separate functional moieties attached.

[0165] The oligonucleotide probes of a microarray may be arranged on the surface of the support based on size. With respect to the arrangement according to size, the probes may be arranged in a continuous or discontinuous size format. In a continuous size format, each successive position in the microarray, for example, a successive position in a lane of probes, comprises oligonucleotide probes of the same molecular weight. In a discontinuous size format, each position in the pattern (e.g., band in a lane) represents a fraction of target molecules derived from the original source, where the probes in each fraction will have a molecular weight within a determined range.

[0166] The probe pattern may take on a variety of configurations as long as each position in the microarray represents a unique size (e.g., molecular weight or range of molecular weights), depending on whether the array has a continuous or discontinuous format. The microarrays may comprise a single lane or a plurality of lanes on the surface of the support. Where a plurality of lanes are present, the number of lanes will usually be at least about 2 but less than about 200 lanes, preferably more than about 5 but less than about 100 lanes, and most preferred more than about 8 but less than about 80 lanes.

[0167] Each microarray may contain oligonucleotide probes isolated from the same source (e.g., the same tissue), or contain probes from different sources (e.g., different tissues, different species, disease and normal tissue). As such, probes isolated from the same source may be represented by one or more lanes; whereas probes from different sources may be represented by individual patterns on the microarray where probes from the same source are similarly located. Therefore, the surface of the support may represent a plurality of patterns of oligonucleotide probes derived from different sources (e.g., tissues), where the probes in each lane are arranged according to size, either continuously or discontinuously.

[0168] Surfaces of the support are usually, though not always, composed of the same material as the support. Alternatively, the surface may be composed of any of a wide variety of materials, for example, polymers, plastics, resins, polysaccharides, silica or silica-based materials, carbon, metals, inorganic glasses, membranes, or any of the above-listed substrate materials. The surface may contain reactive groups, such as carboxyl, amino, or hydroxyl groups. The surface may be optically transparent and may have surface SiOH functionalities, such as are found on silica surfaces.

[0169] 2. Attachment of Oligonucleotide Probes

[0170] The surface of the support may possess a layer of linker molecules (or spacers). The linker molecules may be of sufficient length to permit oligonucleotide probes on the support to hybridize to nucleic acid molecules and to interact freely with molecules exposed to the support. The linker molecules may be about 6-50 molecules long to provide sufficient exposure. The linker molecules may also be, for example, aryl acetylene, ethylene glycol oligomers containing about 2-10 monomer units, diamines, diacids, amino acids, or combinations thereof.

[0171] The linker molecules may be attached to the support via carbon-carbon bonds using, for example, (poly)trifluorochloroethylene surfaces, or preferably, by siloxane bonds (using, for example, glass or silicon oxide surfaces). Siloxane bonds may be formed via reactions of linker molecules containing trichlorosilyl or trialkoxysilyl groups. The linker molecules may also have a site for attachment of a longer chain portion. For example, groups that are suitable for attachment to a longer chain portion may include amines, hydroxyl, thiol, and carboxyl groups. The surface attaching portions may include aminoalkylsilanes, hydroxyalkylsilanes, bis(2-hydroxyethyl)-aminopropyltriethoxysi lane, 2-hydroxyethylaminopropyltriethoxysilane, aminopropyltriethoxysilane, and hydroxypropyltriethoxysilane. The linker molecules may be attached in an ordered array (e.g., as parts of the head groups in a polymerized Langinuir Blodgett film). Alternatively, the linker molecules may be adsorbed to the surface of the support.

[0172] The linker may be a length that is at least the length spanned by, for example, two to four nucleotide monomers. The linking group may be an alkylene group (from about 6 to about 24 carbons in length), a polyethyleneglycol group (from about 2 to about 24 monomers in a linear configuration), a polyalcohol group, a polyamine group (e.g., spermine, spermidine, or polymeric derivatives thereof), a polyester group (e.g., poly(ethylacrylate) from 3 to 15 ethyl acrylate monomers in a linear configuration), a polyphosphodiester group, or a polynucleotide (from about 2 to about 12 nucleic acids). For in situ synthesis, the linking group may be provided with functional groups that can be suitably protected or activated. The linking group may be covalently attached to the oligonucleotide probes by an ether, ester, carbamate, phosphate ester, or amine linkage. In one embodiment, linkages are phosphate ester linkages, which can be formed in the same manner as the oligonucleotide linkages. For example, hexaethyleneglycol may be protected on one terminus with a photolabile protecting group (e.g., NVOC or MeNPOC) and activated on the other terminus with 2-cyanoethyl-N,N-diisopropylamino-chlorophosphite to form a phosphoramidite. This linking group may then be used for construction of oligonucleotide probes in the same manner as the photolabile-protected, phosphoramidite-activated nucleotides.

[0173] Furthermore, the linker molecules and oligonucleotide probes may contain a functional group with a bound protective group. In one embodiment, the protective group is on the distal or terminal end of the linker molecule opposite the support. The protective group may be either a negative protective group (e.g., the protective group renders the linker molecules less reactive with a monomer upon exposure) or a positive protective group (e.g., the protective group renders the linker molecules more reactive with a monomer upon exposure). In the case of negative protective groups, an additional reactivation step may be required, for example, through heating. The protective group on the linker molecules may be selected from a wide variety of positive light-reactive groups preferably including nitro aromatic compounds, such as o-nitrobenzyl derivatives or benzylsulfonyl. Other protective groups include 6-nitroveratryloxycarbonyl (NVOC), 2-nitrobenzyloxycarbonyl (NBOC) or α,α-dimethyl-dimethoxybenzyloxycarbonyl (DDZ). Photoremovable protective groups are described in, for example, Patchornik, 92 J. AM. CHEM. SOC. 6333 (1970) and Amit et al., 39 J. ORG. CHEM. 192 (1974).

[0174] C. Oligonucleotide Probes

[0175] A microarray may contain any number of different oligonucleotide probes. The microarray may have from about 2 to about 100 probes, about 100 to about 10,000 probes, or between about 10,000 and about 1,000,000 probes. In addition, the microarray may have a density of more than 100 oligonucleotide probes at known locations per cm², more than 1,000 probes per cm², or more than 10,000 per cm².

[0176] To detect gene expression, oligonucleotide probes may be designed and synthesized based on known sequence information. For example, 20- to 30-mer oligonucleotides that may be derived from known cDNA or EST sequences may be selected to monitor expression (Lipshutz et al. (1999)). The oligonucleotide probes may be selected from a number of sources including nucleic acid databases such as GenBank, Unigen, HomoloGene, RefSeq, dbEST, and dbSNP (Wheeler et al., 29 NUCL. ACIDS RES. 11-16 (2001)). Generally, the probe is complementary to the reference sequence, preferably unique to the tissue or cell type (e.g., skeletal muscle, neuronal tissue) of interest, and preferably hybridizes with high affinity and specificity (Lockhart et al., 14 NATURE BIOTECHNOL. 1675-80 (1996)). In addition, the oligonucleotide probe may represent non-overlapping sequences of the reference sequence that improves probe redundancy resulting in a reduction in false positive rate and an increased accuracy in target quantitation (Lipshutz et al. (1999)).

[0177] In one embodiment of the present invention, the oligonucleotide probes are relatively unique, for example, at least about 60-80% of the probes may comprise unique oligonucleotides. In another embodiment, modified oligonucleotides from about 80-300 nucleotides in length, or from about 100-200 nucleotides in length, may be used on the microarrays. These are especially useful in place of cDNAs for determining the presence of mRNA in a sample, as the modified oligonucleotides have the advantage of rapid synthesis and purification and analysis before attachment to the substrate surface. In particular, oligonucleotides with 2′-modified sugar groups demonstrate increased binding affinity with RNA, and these oligonucleotides are particularly advantageous in identifying mRNA in a sample exposed to a microarray.

[0178] Generally, the oligonucleotide probes are generated by standard synthesis chemistries such as phosphoramidite chemistry (U.S. Pat. Nos. 4,980,460; 4,973,679; 4,725,677; 4,458,066; and 4,415,732; Beaucage and Iyer, 48 TETRAHEDRON 2223-2311 (1992)). Alternative chemistries that create non-natural backbone groups, such as phosphorothionate and phosphoroamidate may also be employed.

[0179] Using the “flow channel” method, oligonucleotide probes are synthesized at selected regions on the support by forming flow channels on the surface of the support through which appropriate reagents flow or in which appropriate reagents are placed. For example, if a monomer is to be bound to the support in a selected region, all or part of the surface of the selected region may be activated for binding by flowing appropriate reagents through all or some of the channels, or by washing the entire support with appropriate reagents. After placing a channel block on the surface of the support, a reagent containing the monomer may flow through or may be placed in all or some of the channels. The channels provide fluid contact to the first selected region, thereby binding the monomer on the support directly or indirectly (via a spacer) in the first selected region.

[0180] If a second monomer is coupled to a second selected region, some of which may be included among the first selected region, the second selected region may be in fluid contact with second flow channels through translation, rotation, or replacement of the channel block on the surface of the support; through opening or closing a selected valve; or through deposition. The second region may then be activated. Thereafter, the second monomer may then flow through or may be placed in the second flow channels, binding the second monomer to the second selected region. Thus, the resulting oligonucleotides bound to the support are, for example, A, B, and AB. The process is repeated to form a microarray of oligonucleotide probes of desired length at known locations on the support.

[0181] Microarrays may have a plurality of modified oligonucleotides or polynucleotides stably associated with the surface of a support, e.g., covalently attached to the surface with or without a linker molecule. Each oligonucleotide on the array comprises a modified oligonucleotide composition of known identity and usually of known sequence. By stable association, the associated modified oligonucleotides maintain their position relative to the support under hybridization and washing conditions.

[0182] The oligonucleotides may be non-covalently or covalently associated with the support surface. Examples of non-covalent association include non-specific adsorption, binding based on electrostatic interactions (e.g., ion pair interactions), hydrophobic interactions, hydrogen bonding interactions, and specific binding through a specific binding pair member covalently attached to the support surface. Examples of covalent binding include covalent bonds formed between the oligonucleotides and a functional group present on the surface of the rigid support (e.g., —OH), where the functional group may be naturally occurring or present as a member of an introduced linking group.

[0183] II. Protein Microarrays

[0184] Although attempts to evaluate gene activity and to decipher biological processes have traditionally focused on genomics, proteomics offers a promising look at the biological functions of a cell. Proteomics involves the qualitative and quantitative measurement of gene activity by detecting and quantitating expression at the protein level, rather than at the messenger RNA level. Proteomics also involves the study of non-genome encoded events including the post-translational modification of proteins, interactions between proteins, and the location of proteins within the cell.

[0185] The study of gene expression at the protein level is important because many of the most important cellular processes are regulated by the protein status of the cell, not by the status of gene expression. In addition, the protein content of a cell is highly relevant to drug discovery efforts because many drugs are designed to be active against protein targets.

[0186] Current technologies for the analysis of proteomes are based on a variety of protein separation techniques followed by identification of the separated proteins. The most popular method is based on 2D-gel electrophoresis followed by “in-gel” proteolytic digestion and mass spectroscopy. This 2D-gel technique requires large sample sizes, is time consuming, and is currently limited in its ability to reproducibly resolve a significant fraction of the proteins expressed by a human cell. Techniques involving some large-format 2D-gels can produce gels that separate a larger number of proteins than traditional 2D-gel techniques, but reproducibility is still poor and over 95% of the spots cannot be sequenced due to limitations with respect to sensitivity of the available sequencing techniques. The electrophoretic techniques are also plagued by a bias towards proteins of high abundance.

[0187] Standard assays for the presence of an analyte in a solution, such as those commonly used for diagnostics, for example, involve the use of an antibody which has been raised against the targeted antigen. Multianalyte assays known in the art involve the use of multiple antibodies and are directed towards assaying for multiple analytes. However, these multianalyte assays have not been directed towards assaying the total or partial protein content of a cell or cell population. Furthermore, sample sizes required to adapt such standard antibody assay approaches to the analysis of even a fraction of the estimated 100,000 or more different proteins of a human cell and their various modified states are prohibitively large. Automation and/or miniaturization of antibody assays are required if large numbers of proteins are to be assayed simultaneously. Materials, surface coatings, and detection methods used for macroscopic immunoassays and affinity purification are not readily transferable to the formation or fabrication of miniaturized protein arrays.

[0188] Miniaturized DNA chip technologies have been developed and are currently being exploited for the screening of gene expression at the mRNA level. See e.g., U.S. Pat. Nos. 5,744,305; 5,412,087; and 5,445,934. These chips may be used to determine which genes are expressed by different types of cells and in response to different conditions. However, DNA biochip technology is not transferable to protein-binding assays such as antibody assays because the chemistries and materials used for DNA biochips are not readily transferable to use with proteins. Nucleic acids such as DNA withstand temperatures up to 100° C., can be dried and re-hydrated without loss of activity, and can be bound physically or chemically directly to organic adhesion layers supported by materials such as glass while maintaining their activity. In contrast, proteins such as antibodies are preferably kept hydrated and at ambient temperatures are sensitive to the physical and chemical properties of the support materials. Therefore, maintaining protein activity at the liquid-solid interface requires entirely different immobilization strategies than those used for nucleic acids. The proper orientation of the antibody or other protein-capture agent at the interface is desirable to ensure accessibility of their active sites with interacting molecules. With miniaturization of the chip and decreased feature sizes, the ratio of accessible to non-accessible and the ratio of active to inactive antibodies or proteins become increasingly relevant and important.

[0189] Thus, there is a need for the ability to assay in parallel a multitude of proteins expressed by a cell or a population of cells in an organism, including up to the total set of proteins expressed by the cell or cells.

[0190] A. Microarray Supports

[0191] The substrate of the microarray may be either organic or inorganic, biological or non-biological, or any combination of these materials. In addition, the substrate may be transparent or translucent. In one embodiment, the portion of the surface of the substrate on which the regions of protein-capture agents reside is flat and firm. In another embodiment, the portion of the surface of the substrate on which the regions of protein-capture agents reside is semi-firm. Of course, the protein microarrays of the present invention need not necessarily be flat nor entirely two-dimensional. Indeed, significant topological features may be present on the surface of the substrate surrounding the regions, between the regions or beneath the regions. For example, walls or other barriers may separate the regions of the microarray.

[0192] Numerous materials are suitable for use as a substrate in the microarray embodiment of the invention. The substrate of the invention microarray may comprise a material selected from the group consisting of silicon, silica, quartz, glass, controlled pore glass, carbon, alumina, titania, tantalum oxide, germanium, silicon nitride, zeolites, and gallium arsenide. Many metals such as gold, platinum, aluminum, copper, titanium, and their alloys may be useful as substrates of the microarray. Alternatively, many ceramics and polymers may also be used as substrates. Polymers that may be used as substrates include, but are not limited to polystyrene; poly(tetra)fluoroethylene (PTFE); polyvinylidenedifluoride; polycarbonate; polymethylmethacrylate; polyvinylethylene; polyethyleneimine; poly(etherether)ketone; polyoxymethylene (POM); polyvinylphenol; polylactides; polymethacrylimide (PMI); polyalkenesulfone (PAS); polypropylethylene, polyethylene; polyhydroxyethylmethacrylate (HEMA); polydimethylsiloxane; polyacrylamide; polyimide; and block-copolymers. The substrate on which the regions of protein-capture agents reside may also be a combination of any of the aforementioned substrate materials.

[0193] 1. Microarray Support Surface

[0194] The support surfaces comprises the surface on which each of the protein-capture agents is immobilized. The support surfaces may comprise the substrate surface, an altered substrate surface, a coating applied to or formed on the substrate surface, or an organic thinfilm applied to or formed on the substrate surface or coating surface. Support surfacess comprise materials suitable for immobilization of the protein-capture agents to the microarrays. Suitable support surfacess include membranes, such as nitrocellulose membranes, polyvinylidenedifluoride (PVDF) membranes, and the like. In another emobdiment, the support surfaces may comprise a hydrogel such as dextran. Alternatively, the support surfaces may comprise an organic thinfilm including lipids, charged peptides (e.g., polylysine or poly-arginine), or a neutral amino acid (e.g., polyglycine).

[0195] The support surfaces may also comprise a compound that has the ability to interact with both the substrate and the protein-capture agent. For example, functionalities enabling interaction with the substrate may include hydrocarbons having functional groups (e.g. —O—, —CONH—, CONHCO—, —NH—, —CO—, —S—, —SO—), which may interact with functional groups on the substrate. Functionalities enabling interaction with the protein-capture agent comprise antibodies, antigens, receptor ligands, compounds comprising binding sites for affinity tags, and the like.

[0196] In another embodiment, the support surfaces may include a coating. The coating may be formed on, or applied to, the support surfaces. The substrate may be modified with a coating by using thinfilm technology based, for example, on physical vapor deposition (PVD), plasma-enhanced chemical vapor deposition (PECVD), or thermal processing.

[0197] Alternatively, plasma exposure may be used to directly activate or alter the substrate and create a coating. For example, plasma etch procedures can be used to oxidize a polymeric surface (for example, polystyrene or polyethylene to expose polar functionalities such as hydroxyls, carboxylic acids, aldehydes and the like) which then acts as a coating.

[0198] Furthermore, the coating may comprise a component to reduce non-specific binding. For example, a polypropylene substrate may be coated with a compound, such as bovine serum albumin, to reduce non-specific binding. Next, a support surfaces comprising dextran functionally linked to a receptor which recognizes M13 epitopes is added to distinct locations on the coating such that phage expressing recombinant proteins will be bound.

[0199] In an alternative embodiment, the coating may comprise an antibody. More particularly, antibodies that recognize epitope tags engineered into the recombinant proteins may be employed. Alternatively, recombinant proteins may comprise a poly-histidine affinity tag. In this case, an anti-histidine antibody chemically linked to the substrate provides a support surfaces for immobilization of the protein-capture agents.

[0200] In yet another embodiment, the coating may comprise a metal film. The metal film may range from about 50 nm to about 500 nm in thickness. Alternatively, the metal film may range from about 1 nm to about 1 μm in thickness.

[0201] Examples of metal films that may be used as substrate coatings include aluminum, chromium, titanium, tantalum, nickel, stainless steel, zinc, lead, iron, copper, magnesium, manganese, cadmium, tungsten, cobalt, and alloys or oxides thereof. In one embodiment, the metal film is a noble metal film. Noble metals that may be used for a coating include, but are not limited to, gold, platinum, silver, and copper. In another embodiment, the coating comprises gold or a gold alloy. Electron-beam evaporation may be used to provide a thin coating of gold on the surface of the substrate. Additionally, commercial metal-like substances may be employed such as TALON metal affinity resin and the like.

[0202] In alternative embodiments, the coating may comprise a composition selected from the group consisting of silicon, silicon oxide, titania, tantalum oxide, silicon nitride, silicon hydride, indium tin oxide, magnesium oxide, alumina, glass, hydroxylated surfaces, and polymers.

[0203] It is contemplated that the coatings of the microarrays may require the addition of at least one adhesion layer or interlayer between the coating and the substrate. The adhesion layer may be at least about 6 angstroms thick but may be much thicker. For example, a layer of titanium or chromium may be desirable between a silicon wafer and a gold coating. In an alternative embodiment, an epoxy glue such as Epo-tek 377® or Epo-tek 301-2®, (Epoxy Technology Inc., Billerica, Mass.) may be used to aid adherence of the coating to the substrate. Determinations as to what material should be used for the adhesion layer would be obvious to one skilled in the art once materials are chosen for both the substrate and coating. In other embodiments, additional adhesion mediators or interlayers may be necessary to improve the optical properties of the microarray, for example, waveguides for detection purposes.

[0204] In one embodiment of the invention, the surface of the coating is atomically flat. The mean roughness of the surface of the coating may be less than about 5 angstroms for areas of at least about 25 μm². In a specific embodiment, the mean roughness of the surface of the coating is less than about 3 angstroms for areas of at least about 25 μm². In one embodiment, the coating may be a template-stripped surface. See, e.g., Hegner et al., 291 SURFACE SCIENCE 39-46 (1993); Wagner et al., 11 LANGMUIR 3867-3875 (1995).

[0205] Several different types of coating may be combined on the surface. The coating may cover the whole surface of the substrate or only parts of it. In one embodiment, the coating covers the substrate surface only at the site of the regions of protein-capture agents. Techniques useful for the formation of coated regions on the surface of the substrate are well known to those of ordinary skill in the art. For example, the regions of coatings on the substrate may be fabricated by photolithography, micromolding (WO 96/29629), wet chemical or dry etching, or any combination of these.

[0206] a. Organic Thinfilms

[0207] In a particular embodiment, the support surfaces comprises an organic thinfilm layer. The organic thinfilm on which each of the regions of protein-capture agents resides forms a layer either on the substrate itself or on a coating covering the substrate. In one embodiment, the organic thinfilm on which the protein-capture agents of the regions are immobilized is less than about 20 nm thick. In another embodiment, the organic thinfilm of each of the regions is less than about 10 nm thick.

[0208] A variety of different organic thinfilms are suitable for use in the present invention. For example, a hydrogel composed of a material such as dextran may serve as a suitable organic thinfilm on the regions of the microarray. In another embodiment, the organic thinfilm is a lipid bilayer.

[0209] In yet another embodiment, the organic thinfilm of each of the regions of the microarray is a monolayer. A monolayer of polyarginine or polylysine adsorbed on a negatively charged substrate or coating may comprise the organic thinfilm. Another option is a disordered monolayer of tethered polymer chains. In a particular embodiment, the organic thinfilm is a self-assembled monolayer. Specifically, the self-assembled monolayer may comprise molecules of the formula X—R—Y, wherein R is a spacer, X is a functional group that binds R to the surface, and Y is a functional group for binding protein-capture agents onto the monolayer. In an alternative embodiment, the self-assembled monolayer is comprised of molecules of the formula (X)ₐ R(Y)_{b} where a and b are, independently, integers greater than or equal to 1 and X, R, and Y are as previously defined.

[0210] In another embodiment, the organic thinfilm comprises a combination of organic thinfilms such as a combination of a lipid bilayer immobilized on top of a self-assembled monolayer of molecules of the formula X—R—Y. As another example, a monolayer of polylysine may be combined with a self-assembled monolayer of molecules of the formula X-R-Y. See U.S. Pat. No. 5,629,213.

[0211] In all cases, the coating, or the substrate itself if no coating is present, must be compatible with the chemical or physical adsorption of the organic thinfilm on its surface. For example, if the microarray comprises a coating between the substrate and a monolayer of molecules of the formula X—R—Y, then it is understood that the coating must be composed of a material for which a suitable functional group X is available. If no such coating is present, then it is understood that the substrate must be composed of a material for which a suitable functional group X is available.

[0212] In one embodiment of the invention, the area of the substrate surface, or coating surface, which separates the regions of protein-capture agents are free of organic thinflim. In an alternative embodiment, the organic thinfilm may extend beyond the area of the substrate surface, or coating surface if present, covered by the regions of protein-capture agents. For example, the entire surface of the microarray may be covered by an organic thinfilm on which the plurality of spatially distinct regions of protein-capture agents reside. An organic thinfilm that covers the entire surface of the microarray may be homogenous or may comprise regions of differing exposed functionalities useful in the immobilization of regions of different protein-capture agents.

[0213] In yet another embodiment, the areas of the substrate surface or coating surface between the regions of protein-capture agents are covered by an organic thinfilm, but an organic thinfilm of a different type than that of the regions of protein-capture agents. For example, the surfaces between the regions of protein-capture agents may be coated with an organic thinfilm characterized by low non-specific binding properties for proteins and other analytes.

[0214] A variety of techniques may be used to generate regions of organic thinfilm on the surface of the substrate or on the surface of a coating on the substrate. These techniques are well known to those skilled in the art and will vary depending upon the nature of the organic thinfilm, the substrate, and the coating, if present. The techniques will also vary depending on the structure of the underlying substrate and the pattern of any coating present on the substrate. For example, regions of a coating that are highly reactive with an organic thinfilm may have already been produced on the substrate surface. Areas of organic thinfilm may be created by microfluidics printing, microstamping (U.S. Pat. Nos. 5,731,152 and 5,512,131), or microcontact printing (WO 96/29629). Subsequent immobilization of protein-capture agents to the reactive monolayer regions result in two-dimensional arrays of the agents. Inkjet printer heads provide another option for patterning monolayer X—R—Y molecules, or components thereof, or other organic thinfilm components to nanometer or micrometer scale sites on the surface of the substrate or coating. See, e.g., Lemmo et al., 69 ANAL CHEM. 543-551 (1997); U.S. Pat. Nos. 5,843,767 and 5,837,860. In some cases, commercially available arrayers based on capillary dispensing may also be of use in directing components of organic thinfilms to spatially distinct regions of the microarray (OmniGrid® from Genemachines, Inc, San Carlos, Calif., and High-Throughput Microarrayer from Intelligent Bio-Instruments, Cambridge, Mass.). Other methods for the formation of organic thinfilms include in situ growth from the surface, deposition by physisorption, spin-coating, chemisorption, self-assembly, or plasma-initiated polymerization from gas phase.

[0215] Diffusion boundaries between the regions of protein-capture agents immobilized on organic thinfilms such as self-assembled monolayers may be integrated as topographic patterns (physical barriers) or surface functionalities with orthogonal wetting behavior (chemical barriers). For example, walls of substrate material may be used to separate some of the regions of protein-capture agents from some of the others or all of the regions from each other. Alternatively, non-bioreactive organic thinfilms, such as monolayers, with different wettability may be used to separate regions of protein-capture agents from one another.

[0216] B. Protein-Capture Agents

[0217] A protein microarray contemplated by the present invention may contain any number of different proteins, amino acid sequences, nucleic acid sequences, or small molecules. In one embodiment, the microarrays may comprise all or a portion of a gene, including functional derivatives, variants, analogs and portions thereof. The present invention also contemplates microarrays comprising one or more antibodies or functional equivalents thereof that bind proteins, ligands, and/or binding partners.

[0218] For example, the proteins expressed by the protein protein-capture agents immobilized on the microarray may be members of the same family. Such families include, but are not limited to, families of growth factor receptors, hormone receptors, neurotransmitter receptors, catecholamine receptors, amino acid derivative receptors, cytokine receptors, extracellular matrix receptors, antibodies, lectins, cytokines, serpins, proteinases, kinases, phosphatases, ras-like GTPases, hydrolases, steroid hormone receptors, transcription factors, DNA binding proteins, zinc finger proteins, leucine-zipper proteins, homeodomain proteins, intracellular signal transduction modulators and effectors, apoptosis-related factors, DNA synthesis factors, DNA repair factors, DNA recombination factors, cell-surface antigens, Hepatitis C virus (HCV) proteases, HIC proteases, viral integrases, and proteins from pathogenic bacteria.

[0219] A protein-capture agent on the microarray may be any molecule or complex of molecules that has the ability to bind a protein and immobilize it to the site of the protein-capture agent on the microarray. In one aspect, the protein-capture agent binds its binding partner in a substantially specific manner. For example, the protein-capture agent may be a protein whose natural function in a cell is to specifically bind another protein, such as an antibody or a receptor. Alternatively, the protein-capture agent may be a partially or wholly synthetic or recombinant protein that specifically binds a protein.

[0220] Moreover, the protein-capture agent may be a protein which has been selected in vitro from a mutagenized, randomized, or completely random and synthetic library by its binding affinity to a specific protein or peptide target. The selection method used may be a display method such as ribosome display or phage display. Alternatively, the protein-capture agent obtained via in vitro selection may be a DNA or RNA aptamer that specifically binds a protein target. See, e.g., Polyrailo et al., 70 ANAL. CHEM. 3419-25 (1998); Cohen, et al., 94 PROC. NATL. ACAD. SCI. USA 14272-7 (1998); Fukuda, et al., 37 NUCLEIC ACIDS SYMP. SER., 237-8 (1997). Alternatively, the in vitro selected protein-capture agent may be a polypeptide. Roberts and Szostak, 94 PROC. NATL. ACAD. SCI. USA 12297-302 (1997). In yet another embodiment, the protein-capture agent may be a small molecule that has been selected from a combinatorial chemistry library or is isolated from an organism.

[0221] In a particular embodiment, however, the protein-capture agents are proteins. The protein-capture agents may be antibodies or antibody fragments. Although antibody moieties are exemplified herein, it is understood that the present arrays and methods may be advantageously employed with other protein-capture agents.

[0222] The antibodies or antibody fragments of the microarray may be single-chain Fvs, Fab fragments, Fab′ fragments, F(ab′)₂ fragments, Fv fragments, dsFvs diabodies, Fd fragments, full-length, antigen-specific polyclonal antibodies, or full-length monoclonal antibodies. In a specific embodiment, the protein-capture agents of the microarray are monoclonal antibodies, Fab fragments or single-chain Fvs.

[0223] The antibodies or antibody fragments may be monoclonal antibodies, even commercially available antibodies, against known, well-characterized proteins. Alternatively, the antibody fragments may be derived by selection from a library using the phage display method. If the antibody fragments are derived individually by selection based on binding affinity to known proteins, then the binding partners of the antibody fragments are known. In an alternative embodiment of the invention, the antibody fragments are derived by a phage display method comprising selection based on binding affinity to the (typically, immobilized) proteins of a cellular extract or a biological sample. In this embodiment, some or many of the antibody fragments of the microarray would bind proteins of unknown identity and/or function.

[0224] 1. Attachment of Protein-Capture Agents

[0225] It is necessary, however, to immobilize proteins-capture agents on a solid support in a way that preserves their folded conformations. Methods of arraying functionally active proteins using microfabricated polyacrylamide gel pads to preserve samples and microelectrophoresis to accelerate diffusion have been described. Arenkov et al., 278 ANAL. BIOCHEM. 123-31 (2000).

[0226] The method of attachment will vary with the substrate and protein-capture agent selected. For example, in the case of a phage display library, the method of attachment may involve either the direct attachment of the phage as for example, by anti-M13 antibodies, or by attachment via the recombinant protein as for example via antibodies to an epitope-tag incorporated in the recombinant sequence, or by binding of a histidine-tag (his-tag) incorporated in the recombinant sequence to a metal coating on the support surfaces.

[0227] In one embodiment, the protein-immobilizing regions of the microarray comprise an affinity tag that enhances immobilization of the protein-capture agent onto the organic thinfilm. The use of an affinity tag on the protein-capture agent of the microarray provides several advantages. An affinity tag can confer enhanced binding or reaction of the protein-capture agent with the functionalities on the organic thinfilm, such as Y if the organic thinfilm is a an X—R—Y monolayer as previously described. This enhancement effect may be either kinetic or thermodynamic. The affinity tag/organic thinfilm combination used in the regions of protein-capture agents residing on the microarray allows for immobilization of the protein-capture agents in a manner that does not require harsh reaction conditions which are adverse to protein stability or function. In most embodiments, the protein-capture agents are immobilized to the organic thinfilm in aqueous, biological buffers.

[0228] An affinity tag also offers immobilization on the organic thinfilm that is specific to a designated site or location on the protein-capture agent (site-specific immobilization). For this to occur, attachment of the affinity tag to the protein-capture agent must be site-specific. Site-specific immobilization helps ensure that the protein-binding site of the agent, such as the antigen-binding site of the antibody moiety, remains accessible to ligands in solution. Another advantage of immobilization through affinity tags is that it allows for a common immobilization strategy to be used with multiple, different protein-capture agents.

[0229] The affinity tag may be attached directly, either covalently or noncovalently, to the protein-capture agent. In an alternative embodiment, however, the affinity tag is either covalently or noncovalently attached to an adaptor that is either covalently or noncovalently attached to the protein-capture agent.

[0230] In one embodiment, the affinity tag comprises at least one amino acid. The affinity tag may be a polypeptide comprising at least two amino acids which are reactive with the functionalities of the organic thinfilm. Alternatively, the affinity tag may be a single amino acid that is reactive with the organic thinfilm. Examples of possible amino acids that could be reactive with an organic thinfilm include cysteine, lysine, histidine, arginine, tyrosine, aspartic acid, glutamic acid, tryptophan, serine, threonine, and glutamine. A polypeptide or amino acid affinity tag may be expressed as a fusion protein with the protein-capture agent when the protein-capture agent is a protein, such as an antibody or antibody fragment. Amino acid affinity tags provide either a single amino acid or a series of amino acids that may interact with the functionality of the organic thinfilm, such as the Y-functional group of the self-assembled monolayer molecules. Amino acid affinity tags may be readily introduced into recombinant proteins to facilitate oriented immobilization by covalent binding to the Y-functional group of a monolayer or to a functional group on an alternative organic thinfilm.

[0231] The affinity tag may comprise a poly-amino acid tag. A poly-amino acid tag is a polypeptide that comprises from about 2 to about 100 residues of a single amino acid, optionally interrupted by residues of other amino acids. For example, the affinity tag may comprise a poly-cysteine, poly-lysine, poly-arginine, or poly-histidine. Amino acid tags may comprise about two to about twenty residues of a single amino acid, such as, for example, histidines, lysines, arginines, cysteines, glutamines, tyrosines, or any combination of these. For example, an amino acid tag of one to twenty amino acids includes at least one to ten cysteines for thioether linkage; or one to ten lysines for amide linkage; or one to ten arginines for coupling to vicinal dicarbonyl groups. One of ordinary skill in the art can readily pair suitable affinity tags with a given functionality on an organic thinfilm.

[0232] The position of the amino acid tag may be at an amino-, or carboxy-terminus of the protein-capture agent which is a protein, or anywhere in-between, as long as the protein-binding region of the protein-capture agent, such as the antigen-binding region of an immobilized antibody moiety, remains in a position accessible for protein binding. Affinity tags introduced for protein purification may be located at the C-terminus of the recombinant protein to ensure that only full-length proteins are isolated during protein purification. For example, if intact antibodies are used on the microarrays, then the attachment point of the affinity tag on the antibody may be located at a C-terminus of the effector (Fc) region of the antibody. If scFvs are used on the arrays, then the attachment point of the affinity tag may also be located at the C-terminus of the molecules.

[0233] Affinity tags may also contain one or more unnatural amino acids. Unnatural amino acids may be introduced using suppressor tRNAs that recognize stop codons (i.e., amber) See, e.g., Cload et al., 3 CHEM. BIOL. 1033-1038 (1996); Ellman et al., 202 METHODS ENZYM. 301-336 (1991); and Noren et al., 244 SCIENCE 182-188 (1989). The tRNAs are chemically amino-acylated to contain chemically altered (“unnatural”) amino acids for use with specific coupling chemistries (i.e., ketone modifications, photoreactive groups).

[0234] In an alternative embodiment, the affinity tag comprises an intact protein, such as, but not limited to, glutathione S-transferase, an antibody, avidin, or streptavidin.

[0235] In embodiments where the protein-capture agent is a protein and the affinity tag is a protein, such as a poly-amino acid tag or a single amino acid tag, the affinity tag may be attached to the protein-capture agent by generating a fusion protein. Alternatively, protein synthesis or protein ligation techniques known to those skilled in the art may be used. For example, intein-mediated protein ligation may be used to attach the affinity tag to the protein-capture agent. See, e.g., Mathys, et al., 231 GENE 1-13 (1999); Evans, et al., 7 PROTEIN SCIENCE 2256-2264 (1998).

[0236] Other protein conjugation and immobilization techniques known in the art may be adapted for the purpose of attaching affinity tags to the protein-capture agent. For example, the affinity tag may be an organic bioconjugate that is chemically coupled to the protein-capture agent of interest. Biotin or antigens may be chemically cross-linked to the protein. Alternatively, a chemical crosslinker may be used that attaches a simple functional moiety such as a thiol or an amine to the surface of a protein serving as a protein-capture agent on the microarray.

[0237] In one embodiment of the present invention, the organic thinfilm of each of the regions comprises, at least in part, a lipid monolayer or bilayer, and the affinity tag comprises a membrane anchor.

[0238] In an alternative embodiment, no affinity tag is used to immobilize the protein-capture agents onto the organic thinfilm. An amino acid or other moiety (such as a carbohydrate moiety) inherent to the protein-capture agent itself may instead be used to tether the protein-capture agent to the reactive group of the organic thinfilm. In one embodiment, the immobilization is site-specific with respect to the location of the site of immobilization on the protein-capture agent. For example, the sulfhydryl group on the C-terminal region of the heavy chain portion of a Fab′ fragment generated by pepsin digestion of an antibody, followed by selective reduction of the disulfide bond between monovalent Fab′ fragments, may be used as the affinity tag. Alternatively, a carbohydrate moiety on the Fc portion of an intact antibody may be oxidized under mild conditions to an aldehyde group suitable for immobilizing the antibody on a monolayer via reaction with a hydrazide-activated Y group on the monolayer. See e.g., U.S. Pat. No. 6,329,209; Dammer et al., 70 BIOPHYS J. 2437-2441 (1996).

[0239] Because the protein-capture agents of at least some of the different regions on the microarray are different from each other, different solutions, each containing a different protein-capture agent, must be delivered to the individual regions. Solutions of protein-capture agents may be transferred to the appropriate regions via arrayers, which are well-known in the art and even commercially available. For example, microcapillary-based dispensing systems may be used. These dispensing systems may be automated and computer-aided. A description of and building instructions for an example of a microarrayer comprising an automated capillary system can be found on the internet at http://cmgm.stanford.edu/pbrown/microarray.html and http://cmgm.stanford.edu/pbrown/mguide/index.html. The use of other microprinting techniques for transferring solutions containing the protein-capture agents to the agent-reactive regions is also possible. Ink-jet printer heads may also be used for precise delivery of the protein-capture agents to the agent-reactive regions. Representative, non-limiting disclosures of techniques useful for depositing the protein-capture agents on the appropriate regions of the substrate may be found, for example, in U.S. Pat. Nos. 5,843,767 (ink-jet printing technique, Hamilton 2200 robotic pipetting delivery system); 5,837,860 (ink-jet printing technique, Hamilton 2200 robotic pipetting delivery system); 5,807,522 (capillary dispensing device); and 5,731,152 (stamping apparatus). Other methods of arraying functionally active proteins include attaching proteins to the surfaces of chemically derivatized microscope slides. See MacBeath & Schreiber, 289 SCIENCE 1760-63 (2000).

[0240] a. Adaptors

[0241] Another embodiment of the protein microarrays of the present invention comprises an adaptor that links the affinity tag to the protein-capture agent on the regions of the microarray. The additional spacing of the protein-capture agent from the surface of the substrate (or coating) that is afforded by the use of an adaptor is particularly advantageous if the protein-capture agent is a protein, because proteins are prone to surface inactivation. The adaptor may afford some additional advantages as well. For example, the adaptor may help facilitate the attachment of the protein-capture agent to the affinity tag. In another embodiment, the adaptor may help facilitate the use of a particular detection technique with the microarray. One of ordinary skill in the art will be able to choose an adaptor which is appropriate for a given affinity tag. For example, if the affinity tag is streptavidin, then the adaptor could be biotin that is chemically conjugated to the protein-capture agent which is to be immobilized.

[0242] In one embodiment, the adaptor comprises a protein. In another embodiment, the affinity tag, adaptor, and protein-capture agent together compose a fusion protein. Such a fusion protein may be readily expressed using standard recombinant DNA technology. Protein adaptors are especially useful to increase the solubility of the protein-capture agent of interest and to increase the distance between the surface of the substrate or coating and the protein-capture agent. A protein adaptor can also be very useful in facilitating the preparative steps of protein purification by affinity binding prior to immobilization on the microarray. Examples of possible adaptor proteins include glutathione-S-transferase (GST), maltose-binding protein, chitin-binding protein, thioredoxin, and green-fluorescent protein (GFP). GFP may also be used for quantification of surface binding. In an embodiment in which the protein-capture agent is an antibody moiety comprising the Fe region, the adaptor may be a polypeptide, such as protein G, protein A, or recombinant protein A/G (a gene fusion product secreted from a non-pathogenic form of Bacillus which contains four Fc binding domains from protein A and two from protein G).

[0243] 2. Preparation of the Protein-capture Agents of the Microarray

[0244] The protein-capture agents used on the microarray may be produced by any of the variety of means known to those of ordinary skill in the art. The protein-capture agents may comprise proteins, specifically, antibodies or fragments thereof, ligands, receptor proteins, and small molecules.

[0245] In preparation for immobilization to the arrays of the present invention, the antibody moiety, or any other protein-capture agent that is a protein or polypeptide, may be expressed from recombinant DNA either in vivo or in vitro. The cDNA encoding the antibody or antibody fragment or other protein-capture agent may be cloned into an expression vector (many examples of which are commercially available) and introduced into cells of the appropriate organism for expression. A broad range of host cells and protein-capture agents may be used to produce the antibodies and antibody fragments, or other proteins, which serve as the protein-capture agents on the microarray. Expression in vivo may be accomplished in bacteria (e.g., Escherichia coli), plants (e.g., Nicotiana tabacum), lower eukaryotes (e.g., Saccharomyces cerevisiae, Saccharomyces pombe, Pichia pastoris), or higher eukaryotes (e.g., bacculovirus-infected insect cells, insect cells, mammalian cells). For in vitro expression, PCR-amplified DNA sequences may be directly used in coupled in vitro transcription/translation systems (e.g., E. coli S30 lysates from T7 RNA polymerase expressing, preferably protease-deficient strains; wheat germ lysates; reticulocyte lysates). The choice of organism for optimal expression depends on the extent of post-translational modifications (i.e., glycosylation, lipid-modifications) desired. The choice of protein-capture agent also depends on other issues, such as whether an intact antibody is to be produced or just a fragment of an antibody (and which fragment), because disulfide bond formation will be affected by the choice of a host cell. One of ordinary skill in the art will be able to readily choose which host cell type is most suitable for the protein-capture agent and application desired.

[0246] DNA sequences encoding affinity tags and adaptors may be engineered into the expression vectors such that the protein-capture agent genes of interest can be cloned in frame either 5′ or 3′ of the DNA sequence encoding the affinity tag and adaptor protein. In most aspects, the expressed protein-capture agents may purified by affinity chromatography using commercially available resins.

[0247] Production of a plurality of protein-capture agents may involve parallel processing from cloning to protein expression and protein purification. cDNAs encoding the protein-capture agent of interest may be amplified by PCR using cDNA libraries or expressed sequence tag (EST) clones as templates. For in vivo expression of the proteins, cDNAs may be cloned into commercial expression vectors and introduced into an appropriate organism for expression. For in vitro expression PCR-amplified DNA sequences may be directly used in coupled transcription/translation systems.

[0248] E. coli-based protein expression is generally the method of choice for soluble proteins that do not require extensive post-translational modifications for activity. Extracellular or intracellular domains of membrane proteins may be fused to protein adaptors for expression and purification.

[0249] The entire approach may be performed using 96-well assay plates. PCR reactions may be carried out under standard conditions. Oligonucleotide primers may contain unique restriction sites for facile cloning into the expression vectors. Alternatively, the TA cloning system may be used. The expression vectors may further contain the sequences for affinity tags and the protein adaptors. PCR products may be ligated into the expression vectors (under inducible promoters) and introduced into the appropriate competent E. coli strain by calcium-dependent transformation (strains include: XL-1 blue, BL21, SG13009 (lon-)). Transformed E. coli cells are plated and individual colonies transferred into 96-microarray blocks. Cultures are grown to mid-log phase, induced for expression, and cells collected by centrifugation. Cells are resuspended containing lysozyme and the membranes broken by rapid freeze/thaw cycles, or by sonication. Cell debris is removed by centrifugation and the supernatants transferred to 96-tube arrays. The appropriate affinity matrix is added, the protein-capture agent of interest is bound and nonspecifically bound proteins are removed by repeated washing and other steps using centrifugation devices. Alternatively, magnetic affinity beads and filtration devices may be used. The proteins are eluted and transferred to a new 96-well microarray. Protein concentrations are determined and an aliquot of each protein-capture agent is spotted onto a nitrocellulose filter and verified by Western analysis using an antibody directed against the affinity tag on the protein-capture agent. The purity of each sample is assessed by SDS-PAGE and Silver staining or mass spectrometry. The protein-capture agents are then snap-frozen and stored at −80° C.

[0250] S. cerevisiae allows for the production of glycosylated protein-capture agents such as antibodies or antibody fragments. For production in S. cerevisiae, the approach described above for E. coli may be used with slight modifications for transformation and cell lysis. Transformation of S. cerevisiae may be accomplished by lithium-acetate and cell lysis by lyticase digestion of the cell walls followed by freeze-thaw, sonication or glass-bead extraction. Variations of post-translational modifications may be obtained by using different yeast strains (i.e., S. pombe, P. pastoris).

[0251] One aspect of the bacculovirus system is the array of post-translational modifications that can be obtained, although antibodies and other proteins produced in bacculovirus contain carbohydrate structures very different from those produced by mammalian cells. The bacculovirus-infected insect cell system requires cloning of viruses, obtaining high titer stocks and infection of liquid insect cell suspensions (cells such as SF9, SF21).

[0252] Mammalian cell-based expression requires transfection and cloning of cell lines. Either lymphoid or non-lymphoid cell may be used in the preparation of antibodies and antibody fragments. Soluble proteins such as antibodies are collected from the medium while intracellular or membrane bound proteins require cell lysis (either detergent solubilization or freeze-thaw). The protein-capture agents may then be purified by a procedure analogous to that described for E. coli.

[0253] For in vitro translation, the system of choice is E. coli lysates obtained from protease-deficient and T7 RNA polymerase overexpressing strains. E. coli lysates provide efficient protein expression (30-50 μg/ml lysate). The entire process may be carried out in 96-well arrays. Antibody genes or other protein-capture agent genes of interest may be amplified by PCR using oligonucleotides that contain the gene-specific sequences containing a T7 RNA polymerase promoter and binding site and a sequence encoding the affinity tag. Alternatively, an adaptor protein may be fused to the gene of interest by PCR. Amplified DNAs may be directly transcribed and translated in the E. coli lysates without prior cloning for fast analysis. The antibody fragments or other proteins may then be isolated by binding to an affinity matrix and processed as described above.

[0254] Alternative in vitro translation systems that may be used include wheat germ extracts and reticulocyte extracts. In vitro synthesis of membrane proteins or post-translationally modified proteins will require reticulocyte lysates in combination with microsomes.

[0255] In one embodiment of the invention, the protein-capture agents on the microarray comprise monoclonal antibodies. The production of monoclonal antibodies against specific protein targets is routine using standard hybridoma technology. In fact, numerous monoclonal antibodies are available commercially.

[0256] As an alternative to obtaining antibodies or antibody fragments by cell fusion or from continuous cell lines, the antibody moieties may be expressed in bacteriophage. Such antibody phage display technologies are well known to those skilled in the art. The bacteriophage protein-capture agents allow for the random recombination of heavy- and light-chain sequences, thereby creating a library of antibody sequences that may be selected against the desired antigen. The protein-capture agent may be based on bacteriophage lambda or on filamentous phage. The bacteriophage protein-capture agent may be used to express Fab fragments, Fv's with an engineered intermolecular disulfide bond to stabilize the V_{H}-V_{L} pair (dsFv's), scFvs, or diabody fragments.

[0257] The antibody genes of the phage display libraries may be derived from pre-immunized donors. For example, the phage display library could be a display library prepared from the spleens of mice previously immunized with a mixture of proteins, such as a lysate of human T-cells. Immunization may be used to bias the library to contain a greater number of recombinant antibodies reactive towards a specific set of proteins, such as proteins found in human T-cells. Alternatively, the library antibodies may be derived from native or synthetic libraries. The native libraries may be constructed from spleens of mice that have not been contacted by external antigen. In a synthetic library, portions of the antibody sequence, typically those regions corresponding to the complementarity determining regions (CDR) loops, have been mutagenized or randomized.

[0258] III. Target Samples

[0259] Biological samples may be isolated from several sources including, but not limited to, a patient or a cell line. Patient samples may include blood, urine, amniotic fluid, plasma, semen, bone marrow, and tissues. Once isolated, total RNA or protein may be extracted using methods well known in the art. For example, target samples may be generated from total RNA by dT-primed reverse transcription producing cDNA (see e.g., SAMBROOK ET AL., MOLECULAR CLONING: A LABORATORY MANUAL, Cold Spring Harbor Press, New York (1989); AUSUBEL ET AL., CURRENT PROTOCOLS IN MOLECULAR BIOLOGy, John Wiley & Sons, Inc. (1995)). The cDNA may then be transcribed to cRNA by in vitro transcription resulting in a linear amplification of the RNA. The target samples may be labeled with, for example, a fluorescent dye (e.g., Cy3-dUTP) or biotin. The labeled targets may be hybridized to the microarray. Laser excitation of the target samples produces fluorescence emissions, which are captured by a detector. This information may then be used to generate a quantitative two-dimensional fluorescence image of the hybridized targets.

[0260] Gene expression profiles of a particular tissue or cell type may be generated from RNA (i.e., total RNA or mRNA). Reverse transcription with an oligo-dT primer may be used to isolate and generate mRNA from cellular RNA. To maximize the amount of sample or signal, labeled total RNA may also be used. The RNA may be fluorescently labeled or labeled with a radioactive isotope. For radioactive detection, a low energy emitter, such as ³³P-dCTP, is preferred due to close proximity of the oligonucleotide probes on the support. The fluorophores, Cy3-dUTP or Cy5-dUTP, may used for fluorescent labeling. These fluorophores demonstrate efficient incorporation with reverse transcriptase and better yields. Furthermore, these fluorophores possess distinguishable excitation and emission spectra. Thus, two samples, each labeled with a different fluorophore, may be simultaneously hybridized to a microarray.

[0261] The nucleic acid sample may be amplified prior to hybridization. Amplification methods include, but are not limited to PCR (INNIS ET AL., PCR PROTOCOLS. A GUIDE TO METHODS AND APPLICATION, Academic Press, Inc. San Diego, (1990)), ligase chain reaction (LCR) (Barringer et al., 89 GENE 117 (1990); Wu and Wallace, 4 GENOMES 560 (1989); and Landegren et al., 241 SCIENCE 1077 (1988)), transcription amplification (Kwoh, et al., 86 PROC. NATL. ACAD. SCI. USA 1173 (1989)), and self-sustained sequence replication (Guatelli, et al., 87 PROC. NATL. ACAD. SCI. USA 1874 (1990)).

[0262] The target nucleic acids may be labeled at one or more nucleotides during or after amplification. Labels suitable for use with microarray technology include labels detectable by spectroscopic, photochemical, biochemical, immunochemical, electrical, optical, or chemical means. In one embodiment, the detectable label is a luminescent label, such as fluorescent labels, chemiluminescent labels, bioluminescent labels, and colorimetric labels. In a specific embodiment, the label is a fluorescent label such as fluorescein, rhodamine, lissamine, phycoerythrin, polymethine dye derivative, phosphor, or Cy2, Cy3, Cy3.5, Cy5, Cy5.5, Cy7. Commercially available fluorescent labels include fluorescein phosphoramidites such as Fluoreprime (Pharmacia, Piscataway, N.J.), Fluoredite (Millipore, Bedford, Mass.), and FAM (ABI, Foster City, Calif.). Other labels include biotin for staining with labeled streptavidin conjugate, magnetic beads (e.g., Dynabeads), fluorescent dyes (e.g., texas red, rhodamine, green fluorescent protein), radiolabels (e.g., ³H, ¹²⁵I, ³⁵S, ¹⁴C, or ³²P), enzymes (e.g., horseradish peroxidase, alkaline phosphatase), and colorimetric labels such as colloidal gold or colored glass or plastic (e.g., polystyrene, polypropylene, latex) beads (see e.g., U.S. Pat. Nos. 4,366,241; 4,277,437; 4,275,149; 3,996,345; 3,939,350; 3,850,752; and 3,817,837).

[0263] The labeled RNA targets are then hybridized to the microarray. A number of buffers may be used for hybridization assays. By way of example, but not limitation, the buffers can be any of the following: 5 M betaine, 1 M NaCl, pH 7.5; 4.5 M betaine, 0.5 M LiCl, pH 8.0; 3 M TMACl, 50 mM Tris-HCl, 1 mM EDTA, 0.1% N-lauroyl-sarkosine (NLS); 2.4 M TEACl, 50 mM Tris-HCl, pH 8.0, 0.1% NLS; 1 M LiCl, 10 mM Tris-HCl, pH 8.0, 10% formamide; 2 M GuSCN, 30 mM NaCitrate, pH 7.5; 1 M LiCl, 10 mM Tris-HCl, pH 8.0, 1 mM CTAB; 0.3 mM spermine, 10 mM Tris-HCl, pH 7.5; 2 M NH₄OAc with 2 volumes absolute ethanol. Addition volumes of ionic detergents (such as N-lauroyl-sarkosine) may be added to the buffer. Hybridization may be performed at about 20-65° C. (see e.g., U.S. Pat. No. 6,045,996). Additional examples of hybridization conditions are disclosed in SAMBROOK ET AL., (1989); Berger and Kimmel, GUIDE TO MOLECULAR CLONING TECHNIQUES, METHODS IN ENZYMOLOGY, (1987), Volume 152, Academic Press, Inc., San Diego, Calif.; Young and Davis, 80 PROC. NATL. ACAD. SCI. U.S.A 1194 (1983).

[0264] The hybridization buffer may be a formamide-based buffer or an aqueous buffer containing dextran sulfate or polyethylene glycol (see e.g., Cheung et al., 21 NATURE GENET. 15-19(1999); SAMBROOK ET AL. (1989)). In addition, the hybridization buffer may contain blocking agents such as sheared salmon sperm DNA or Denhardt's reagent to minimize nonspecific binding or background noise. Approximately 50-200 μg labeled total RNA or 2-5 μg labeled mRNA per hybridization is required for a sufficient fluorescent signal and detection. Typically, the amount of oligonucleotide probes attached to the support is in excess of the labeled target RNA.

[0265] Following hybridization, the nucleic acids may be analyzed by detecting one or more labels attached to the target nucleic acids. The labels may be incorporated by any of a number of methods well-known in the art. In one embodiment, the label may be simultaneously incorporated during the amplification step in the preparation of the target nucleic acids. For example, a labeled amplification product may be generated by PCR using labeled primers or labeled nucleotides. Transcription amplification using a labeled nucleotide (e.g., fluorescein-labeled UTP or CTP) incorporates a label into the transcribed nucleic acids. Alternatively, a label may be added directly to the original nucleic acid sample or to the amplification product following amplification. Methods for labeling nucleic acids are well-known in the art and include, for example, nick translation or end-labeling.

[0266] The hybridized array is then subjected to laser excitation, which produces an emission with a unique spectra. The spectra are scanned, for example, with a scanning confocal laser microscope generating monochrome images of the microarray. These images are digitally processed and normalized based on a threshold value (e.g., background) using mathematical algorithms. For example, a threshold value of 0 may be assigned when no change in the level of fluorescence is observed; an increase in fluorescence may be assigned a value of +1 and a decrease in fluorescence may be assigned a value of −1. Normalization may be based on a designated subgroup of genes where variations in this subgroup are utilized to generate statistics applicable for evaluating the complete gene microarray. Chen et al., 2 J. BIOMED. OPTICS 364-67 (1997).

[0267] Use of one of the protein microarrays of the present invention may involve placing the two-dimensional microarray in a flowchamber with approximately 1-10 μl of fluid volume per 25 mm² overall surface area. The cover over the microarray in the flowchamber is preferably transparent or translucent. In one embodiment, the cover may comprise Pyrex or quartz glass. In other embodiments, the cover may be part of a detection system that monitors interaction between the protein-capture agents immobilized on the microarray and protein in a solution such as a cellular extract from a biological sample. The flowchambers should remain filled with appropriate aqueous solutions to preserve protein activity. Salt, temperature, and other conditions are preferably kept similar to those of normal physiological conditions. Proteins in a fluid solution may be flushed into the flow chamber as desired and their interaction with the immobilized protein-capture agents determined. Sufficient time must be given to allow for binding between the protein-capture agent and its binding partner to occur. The amount of time required for this will vary depending upon the nature and tightness of the affinity of the protein-capture agent for its binding partner. No specialized microfluidic pumps, valves, or mixing techniques are required for fluid delivery to the microarray.

[0268] Alternatively, protein-containing fluid may be delivered to each of the regions of protein-capture agents individually. For example, in one embodiment, the regions of the substrate surface where the protein-capture agents reside may be microfabricated in such a way as to allow integration of the microarray with a number of fluid delivery channels oriented perpendicular to the microarray surface, each one of the delivery channels terminating at the site of an individual protein-capture agent-coated region.

[0269] The sample, which is delivered to the microarray, will typically be a fluid. In a one embodiment, the sample is a cellular extract or a biological sample. The sample to be assayed may comprise a complex mixture of proteins, including a multitude of proteins which are not binding partners of the protein-capture agents of the microarray. If the proteins to be analyzed in the sample are membrane proteins, then those proteins will typically need to be solubilized prior to administration of the sample to the microarray. If the proteins to be assayed in the sample are proteins secreted by a population of cells in an organism, the sample may be a biological sample. If the proteins to be assayed in the sample are intracellular, a sample may be a cellular extract. In another embodiment, the microarray may comprise protein-capture agents that bind fragments of the expression products of a cell or population of cells in an organism. In such a case, the proteins in the sample to be assayed may have been prepared by performing a digest of the protein in a cellular extract or a biological sample. In an alternative application, the proteins from only specific fractions of a cell are collected for analysis in the sample.

[0270] In general, delivery of solutions containing proteins to be bound by the protein-capture agents of the microarray may be preceded, followed, or accompanied by delivery of a blocking solution. A blocking solution contains protein or another moiety that will adhere to sites of non-specific binding on the microarray. For example, solutions of bovine serum albumin or milk may be used as blocking solutions.

[0271] The binding partners of the plurality of protein-capture agents on the microarray are proteins that are all expression products, or fragments thereof, of a cell or population of cells of a single organism. The expression products may be proteins, including peptides, of any size or function. They may be intracellular proteins or extracellular proteins. The expression products may be from a one-celled or multicellular organism. The organism may be a plant or an animal. In a specific embodiment of the invention, the binding partners are human expression products, or fragments thereof.

[0272] In another embodiment of the present invention, the binding partners of the protein-capture agents of the microarray may be a randomly chosen subset of all the proteins, including peptides, which are expressed by a cell or population of cells in a given organism or a subset of all the fragments of those proteins. Thus, the binding partners of the protein-capture agents of the microarray may represent a wide distribution of different proteins from a single organism.

[0273] The binding partners of some or all of the protein-capture agents on the microarray need not necessarily be known. Indeed, the binding partner of a protein-capture agent of the microarray may be a protein or peptide of unknown function. For example, the different protein-capture agents of the microarray may together bind a wide range of cellular proteins from a single cell type, many of which are of unknown identity and/or function.

[0274] In another embodiment of the present invention, the binding partners of the protein-capture agents on the microarray are related proteins. The different proteins bound by the protein-capture agents may be members of the same protein family. The different binding partners of the protein-capture agents of the microarray may be either functionally related or simply suspected of being functionally related. The different proteins bound by the protein-capture agents of the microarray may also be proteins that share a similarity in structure or sequence or are simply suspected of sharing a similarity in structure or sequence. For example, the binding partners of the protein-capture agents on the microarray may be growth factor receptors, hormone receptors, neurotransmitter receptors, catecholamine receptors, amino acid derivative receptors, cytokine receptors, extracellular matrix receptors, antibodies, lectins, cytokines, serpins, proteases, kinases, phosphatases, ras-like GTPases, hydrolases, steroid hormone receptors, transcription factors, heat-shock transcription factors, DNA-binding proteins, zinc-finger proteins, leucine-zipper proteins, homeodomain proteins, intracellular signal transduction modulators and effectors, apoptosis-related factors, DNA synthesis factors, DNA repair factors, DNA recombination factors, cell-surface antigens, hepatitis C virus (HCV) proteases or HIV proteases and may correspond to all or part of the proteins encoded by the genes of the gene expression profiles of the present invention.

[0275] IV. Control Oligonucleotides and Protein-Capture Agents

[0276] Control oligonucleotides corresponding to genomic DNA, housekeeping genes, or negative and positive control genes may also be present on the microarray. Similarly, protein-capture agents that bind housekeeping proteins, or negative and positive control proteins, such as beta actin protein, may also be present on the microarray. These controls are used to calibrate background or basal levels of expression, and to provide other useful information.

[0277] Normalization controls may be oligonucleotide probes that are perfectly complementary to labeled reference oligonucleotides that are added to the nucleic acid sample. Normalization controls may be protein-capture agents that bind specifically and consistently to a labeled reference protein that is added to the protein sample. For example, a protein-capture agent/normalization control pair may comprise avidin/streptavidin or a well-known antibody/antigen combination with a known binding coefficient. The signals obtained from the normalization controls after hybridization provide a control for variations in hybridization conditions, label intensity, efficiency, and other factors that may cause the hybridization signal to vary between microarrays. To normalize fluorescence intensity measurements, for example, signals from all probes of the microarray may be divided by the signal from the control probes.

[0278] Expression level controls are probes or protein-capture agents that hybridize/bind specifically with constitutively expressed genes in the biological sample and are designed to control the overall metabolic activity of a cell. Analysis of the variations in the levels of the expression control as compared to the expression level of the target nucleic acid or target protein indicates whether variations in the expression level of a gene or protein is due specifically to changes in the transcription rate of that gene or to general variations in the health of the cell. Thus, if the expression levels of both the expression control and the target gene decrease or increase, these alterations may be attributed to changes in the metabolic activity of the cell as a whole, not to differential expression of the target gene or protein in question. If only the expression of the target gene or protein varies, however, then the variation in the expression may be attributed to differences in regulation of that gene or protein and not to overall variations in the metabolic activity of the cell. Constitutively expressed genes such as housekeeping genes (e.g., β-actin gene, transferrin receptor gene, GAPDH gene) may serve as expression level controls.

[0279] Mismatch controls may also be used for expression level controls or for normalization controls. These probes and protein-capture agents provide a control for non-specific binding or cross-hybridization to a nucleic acid in the sample other than the target to which the probe is directed. Mismatch controls are oligonucleotide probes identical to the corresponding test or control probes except for the presence of one or more mismatched bases. One or more mismatches (e.g., substituting guanine, cytidine, or thymine for adenine) are selected such that under appropriate hybridization conditions (e.g., stringent conditions), the test or control probe would be expected to hybridize with its target sequence, but the mismatch probe would not hybridize or would hybridize to a significantly lesser extent. Similarly, an antibody may be used as a mismatch control protein-capture agent. For example, an antibody may be used that has a base pair mismatch in the binding domain that affects binding as compared to the normal antibody.

[0280] V. Detection Methods and Analysis of Hybridization Results

[0281] Methods for signal detection of labeled target nucleic acids hybridized to microarray probes are well-known in the art. For example, a radioactive labeled probe may be detected by radiation emission using photographic film or a gamma counter. For fluorescently labeled target nucleic acids, the localization of the label on the probe microarray may be accomplished with fluorescent microscopy. The hybridized microarray is excited with a light source at the excitation wavelength of the particular fluorescent label and the resulting fluorescence is detected. The excitation light source may be a laser appropriate for the excitation of the fluorescent label.

[0282] Confocal microscopy may be automated with a computer-controlled stage to automatically scan the entire microarray. Similarly, a microscope may be equipped with a phototransducer (e.g., a photomultiplier) attached to an automated data acquisition system to automatically record the fluorescence signal produced by hybridization to oligonucleotide probes. See e.g., U.S. Pat. No. 5,143,854.

[0283] The present invention also relates to methods for evaluating the hybridization results. These methods may vary with the nature of the specific oligonucleotide probes or protein-capture agent used as well as the controls provided. For example, quantification of the fluorescence intensity for each probe may be accomplished by measuring the probe signal strength at each location (representing a different probe) on the microarray (e.g., detection of the amount of florescence intensity produced by a fixed excitation illumination at each location on the array). The fluorescent intensity for each protein-capture agent and binding pair may be accomplished using similar methods. The absolute intensities of the target nucleic acids or proteins hybridized to the microarray may then be compared with the intensities produced by the controls, providing a measure of the relative expression of the nucleic acids or proteins that hybridize to each of the probes or protein-capture agents.

[0284] Normalization of the signal derived from the target nucleic acids to the normalization controls may provide a control for variations in hybridization conditions. Typically, normalization may be accomplished by dividing the measured signal from the other probes or protein-capture agents in the array by the average signal produced by the normalization controls. Normalization may also include correction for variations due to sample preparation and amplification. Such normalization may be accomplished by dividing the measured signal by the average signal from the sample preparation/amplification control probes or protein-capture agents. The resulting values may be multiplied by a constant value to scale the results. Other methods for analyzing microarray data are well-known in the art including coupled two-way clustering analysis, clustering algorithms (hierarchical clustering, self-organizing maps), and support vector machines. See e.g., Brown et al., 97 PROC. NATL. ACAD. SCI. USA 262-67 (2000); Getz et al., 97 PROC. NATL. ACAD. SCI. USA 12079-84 (2000); Holter et al., 97 PROC. NATL. ACAD. SCI. USA 8409-14 (2000); Tamayo et al., 96 PROC. NATL. ACAD. SCI. USA 2907-12 (1999); Eisen et al., 95 PROC. NATL. ACAD. SCI. USA 14863-68 (1998); and Ermolaeva et al, 20 NATURE GENET. 19-23 (1998).

[0285] Indeed, the methodologies useful in analyzing gene expression profiles and gene expression data are equally applicable in the context of the study of protein expression. In general, for a variety of applications including proteomics and diagnostics, the methods of the present invention involve the delivery of the sample containing the proteins to be analyzed to the microarrays. After the proteins of the sample have been allowed to interact with and become immobilized on the regions comprising protein-capture agents with the appropriate biological specificity, the presence and/or amount of protein bound at each region is then determined. The detection methods, analysis tools, and algorithms described for the nucleic acid micorarrays are equally applicable in the context of protein microarrays.

[0286] In addition to the methods described above, a wide range of detection methods are available to analyze the results of protein microarray experiments. Detection may be quantitative and/or qualitative. The protein microarray may be interfaced with optical detection methods such as absorption in the visible or infrared range, chemoluminescence, and fluorescence (including lifetime, polarization, fluorescence correlation spectroscopy (FCS), and fluorescence-resonance energy transfer (FRET)). Other modes of detection such as those based on optical waveguides (WO 96/26432 and U.S. Pat. No. 5,677,196), surface plasmon resonance, surface charge sensors, and surface force sensors are compatible with many embodiments of the present invention. Alternatively, technologies such as those based on Brewster Angle microscopy (BAM) (Schaafet al., 3 LANGMUIR 1131-1135 (1987)) and ellipsometry (U.S. Pat. Nos. 5,141,311 and 5,116,121; Kim, 22 MACROMOLECULES 2682-2685 (1984)) may be utilized. Quartz crystal microbalances and desorption processes provide still other alternative detection means suitable for at least some embodiments of the invention microarray. See, e.g., U.S. Pat. No. 5,719,060. An example of an optical biosensor system compatible both with some arrays of the present invention and a variety of non-label detection principles including surface plasmon resonance, total internal reflection fluorescence (TIRF), Brewster Angle microscopy, optical waveguide lightmode spectroscopy (OWLS), surface charge measurements, and ellipsometry are discussed in U.S. Pat. No. 5,313,264.

[0287] Other different types of detection systems suitable to assay the protein expression arrays of the present invention include, but are not limited to, fluorescence, measurement of electronic effects upon exposure to a compound or analyte, luminescence, ultraviolet visible light, and laser induced fluorescence (LIF) detection methods, collision induced dissociation (CID), mass spectroscopy (MS), CCD cameras, electron and three dimensional microscopy. Other techniques are known to those of skill in the art. For example, analyses of combinatorial arrays and biochip formats have been conducted using LIF techniques that are relatively sensitive. See, e.g., Ideue et al., 337 CHEM. PHYSICS LETTERS 79-84 (2000).

[0288] One detection system of particular interest is time-of-flight mass spectrometry (TOF-MS). Using parallel sampling techniques, time-of-flight mass spectrometry may be used for the detailed characterization of hundreds of molecules in a sample mixture at each discreet location within the microarray. Time-of-flight mass spectrometry based systems enable extremely rapid analysis (microseconds to milliseconds instead of seconds for scanning MS devises) high levels of selectivity compared to other techniques with good sensitivity (better than one part per million, as opposed to one part per ten thousand for scanning MS), As a mass spectroscopic technique, time-of-flight mass spectrometry provides molecular weight and structural information for identification of unknown samples.

[0289] Additional levels of sensitivity are added by coupling time-of-flight mass spectrometry to another separation system. Thus, in an embodiment, the present invention comprises using ion mobility in combination with time-of-flight mass spectrometry for the analysis of microarrays. The combination of ion mobility and time-of-flight mass spectrometry is referred to as multi-dimensional spectroscopy (MDS). Ions are electrosprayed into the front of the MDS device. Electrospray is a method for ionizing relatively large molecules and having them form a gas phase. The solution containing the sample is sprayed at high voltage, forming charged droplets. These droplets evaporate, leaving the sample's ionized molecules in the gas phase. These ions continue into the ion mobility chamber where the ions travel under the influence of a uniform electric field through a buffer gas. The principle underlying ion mobility separation techniques is that compact ions undergo fewer collisions than ions having extended shapes and thus, have increased mobility. As the separated components (comprising ions/molecules of different mobility) exit the drift tube, they are pulsed into a time-of-flight mass spectrometer.

[0290] Although non-label detection methods are generally preferred, some of the types of detection methods commonly used for traditional immunoassays that require the use of labels may be applied to the arrays of the present invention. These techniques include noncompetitive immunoassays, competitive immunoassays, and dual label, radiometric immunoassays. These techniques are primarily suitable for use with the arrays of protein-capture agents when the number of different protein-capture agents with different specificity is small (less than about 100). In the competitive method, binding-site occupancy is determined indirectly. In this method, the protein-capture agents of the microarray are exposed to a labeled developing agent, which is typically a labeled version of the analyte or an analyte analog. The developing agent competes for the binding sites on the protein-capture agent with the analyte. The fractional occupancy of the protein-capture agents on different regions can be determined by the binding of the developing agent to the protein-capture agents of the individual regions.

[0291] In the noncompetitive method, binding site occupancy is determined directly. In this method, the regions of the microarray are exposed to a labeled developing agent capable of binding to either the bound analyte or the occupied binding sites on the protein-capture agent. For example, the developing agent may be a labeled antibody directed against occupied sites (i.e., a “sandwich assay”). Alternatively, a dual label, radiometric, approach may be taken where the protein-capture agent is labeled with one label and the second, developing agent is labeled with a second label. See Ekins, et al., 194 CLINICA CHIMICA ACTA. 91-114, (1990). Many different labeling methods may be used in the aforementioned techniques, including radioisotopic, enzymatic, chemiluminescent, and fluorescent methods.

[0292] VI. Types Of Microarrays

[0293] The microarrays of the present invention may be derived from or representative of a specific organism, or cell type, including human microarrays, cancer microarrays, apoptosis microarrays, oncogene and tumor suppressor microarrays, cell-cell interaction microarrays, cytokine and cytokine receptor microarrays, blood microarrays, cell cycle microarrays, neuroarrays, mouse microarrays, and rat microarrays, or combinations thereof.

[0294] In further embodiments, the microarrays may represent diseases including cardiovascular diseases, neurological diseases, immunological diseases, various cancers, infectious diseases, endocrine disorders, and genetic diseases.

[0295] Alternatively, the microarrays of the present invention may represent a particular tissue type, such as heart, liver, prostate, lung, nerve, muscle, or connective tissue; preferably coronary artery endothelium, umbilical artery endothelium, umbilical vein endothelium, aortic endothelium, dermal microvascular endothelium, pulmonary artery endothelium, myometrium microvascular endothelium, keratinocyte epithelium, bronchial epithelium, mammary epithelium, prostate epithelium, renal cortical epithelium, renal proximal tubule epithelium, small airway epithelium, renal epithelium, umbilical artery smooth muscle, neonatal dermal fibroblast, pulmonary artery smooth muscle, dermal fibroblast, neural progenitor cells, skeletal muscle, astrocytes, aortic smooth muscle, mesangial cells, coronary artery smooth muscle, bronchial smooth muscle, uterine smooth muscle, lung fibroblast, osteoblasts, prostate stromal cells, or combinations thereof.

[0296] The present invention contemplates microarrays comprising a gene expression profile comprising one or more nucleic acid sequences including complementary and homologous sequences, wherein said gene expression profile is generated from a cell type selected from the group comprising coronary artery endothelium, umbilical artery endothelium, umbilical vein endothelium, aortic endothelium, dermal microvascular endothelium, pulmonary artery endothelium, myometrium microvascular endothelium, keratinocyte epithelium, bronchial epithelium, mammary epithelium, prostate epithelium, renal cortical epithelium, renal proximal tubule epithelium, small airway epithelium, renal epithelium, umbilical artery smooth muscle, neonatal dermal fibroblast, pulmonary artery smooth muscle, dermal fibroblast, neural progenitor cells, skeletal muscle, astrocytes, aortic smooth muscle, mesangial cells, coronary artery smooth muscle, bronchial smooth muscle, uterine smooth muscle, lung fibroblast, osteoblasts, and prostate stromal cells.

[0297] The present invention contemplates microarrays comprising one or more protein-capture agents, wherein said protein expression profile is generated from a cell type selected from the group comprising coronary artery endothelium, umbilical artery endothelium, umbilical vein endothelium, aortic endothelium, dermal microvascular endothelium, pulmonary artery endothelium, myometrium microvascular endothelium, keratinocyte epithelium, bronchial epithelium, mammary epithelium, prostate epithelium, renal cortical epithelium, renal proximal tubule epithelium, small airway epithelium, renal epithelium, umbilical artery smooth muscle, neonatal dermal fibroblast, pulmonary artery smooth muscle, dermal fibroblast, neural progenitor cells, skeletal muscle, astrocytes, aortic smooth muscle, mesangial cells, coronary artery smooth muscle, bronchial smooth muscle, uterine smooth muscle, lung fibroblast, osteoblasts, and prostate stromal cells.

[0298] In a specific embodiment, the present invention provides a microarray comprising an endothelial cell gene expression profile comprising one or more nucleic acid sequences substantially homlogous to a nucleic acid sequence or complementary sequence thereof, or portions of said nucleic acid sequence or complementary sequence thereof, selected from the group consisting of SEQ ID NO: 1; SEQ ID NO: 2; SEQ ID NO: 3; SEQ ID NO: 4; SEQ ID NO: 5; SEQ ID NO: 6; SEQ ID NO: 7; SEQ ID NO: 8; SEQ ID NO: 9; SEQ ID NO: 10; SEQ ID NO: 11; SEQ ID NO: 12; SEQ ID NO: 13; SEQ ID NO: 14; SEQ ID NO: 15; SEQ ID NO: 16; SEQ ID NO: 17; SEQ ID NO: 18; SEQ ID NO: 19; SEQ ID NO: 20; SEQ ID NO: 21; SEQ ID NO: 22; SEQ ID NO: 23; SEQ ID NO: 48; SEQ ID NO: 63; SEQ ID NO: 70; SEQ ID NO: 82; SEQ ID NO: 94; and SEQ ID NO: 144.

[0299] In another embodiment, a microarray of the present invention may comprise a muscle cell gene expression profile comprising one or more nucleic acid sequences substantially homlogous to a nucleic acid sequence or complementary sequence thereof, or portions of said nucleic acid sequence or complementary sequence thereof, selected from the group consisting of SEQ ID NO: 24; SEQ ID NO: 25; SEQ ID NO: 26; SEQ ID NO: 27; SEQ ID NO: 28; SEQ ID NO: 29; SEQ ID NO: 30; SEQ ID NO: 31; SEQ ID NO: 32; SEQ ID NO: 33; SEQ ID NO: 34; SEQ ID NO: 35; SEQ ID NO: 36; SEQ ID NO: 37; SEQ ID NO: 39; SEQ ID NO: 40; SEQ ID NO: 41; SEQ ID NO: 42; SEQ ID NO: 54; SEQ ID NO: 55; and SEQ ID NO: 69.

[0300] In an alternative embodiment, a microarray comprises a primary cell gene expression profile comprising one or more nucleic acid sequences substantially homlogous to a nucleic acid sequence or complementary sequence thereof, or portions of said nucleic acid sequence or complementary sequence thereof, selected from the group consisting of SEQ ID NO: 1; SEQ ID NO: 2; SEQ ID NO: 3; SEQ ID NO: 4; SEQ ID NO: 5; SEQ ID NO: 6; SEQ ID NO: 7; SEQ ID NO: 8; SEQ ID NO: 9; SEQ ID NO: 10; SEQ ID NO: 11; SEQ ID NO: 12; SEQ ID NO: 13; SEQ ID NO: 14; SEQ ID NO: 15; SEQ ID NO: 16; SEQ ID NO: 17; SEQ ID NO: 18; SEQ ID NO: 19; SEQ ID NO: 20; SEQ ID NO: 21; SEQ ID NO: 22; SEQ ID NO: 23; SEQ ID NO: 24; SEQ ID NO: 25; SEQ ID NO: 26; SEQ ID NO: 27; SEQ ID NO: 28; SEQ ID NO: 29; SEQ ID NO: 30; SEQ ID NO: 31; SEQ ID NO: 32; SEQ ID NO: 33; SEQ ID NO: 34; SEQ ID NO: 35; SEQ ID NO: 36; SEQ ID NO: 37; SEQ ID NO: 39; SEQ ID NO: 40; SEQ ID NO: 41; SEQ ID NO: 42; SEQ ID NO: 43; SEQ ID NO: 44; SEQ ID NO: 45; SEQ ID NO: 46; SEQ ID NO: 47; SEQ ID NO: 48; SEQ ID NO: 49; SEQ ID NO: 50; SEQ ID NO: 51; SEQ ID NO: 52; SEQ ID NO: 53; SEQ ID NO: 54; SEQ ID NO: 55; SEQ ID NO: 56; SEQ ID NO: 57; SEQ ID NO: 58; SEQ ID NO: 59; SEQ ID NO: 60; SEQ ID NO: 61; SEQ ID NO: 62; SEQ ID NO: 63; SEQ ID NO: 64; SEQ ID NO: 65; SEQ ID NO: 66; SEQ ID NO: 67; SEQ ID NO: 68; SEQ ID NO: 69; SEQ ID NO: 70; SEQ ID NO: 71; SEQ ID NO: 72; SEQ ID NO: 73; SEQ ID NO: 74; SEQ ID NO: 75; SEQ ID NO: 76; SEQ ID NO: 77; SEQ ID NO: 78; SEQ ID NO: 79; SEQ ID NO: 80; SEQ ID NO: 81; SEQ ID NO: 82; SEQ ID NO: 83; SEQ ID NO: 84; SEQ ID NO: 85; SEQ ID NO: 86; SEQ ID NO: 87; SEQ ID NO: 88; SEQ ID NO: 89; SEQ ID NO: 90; SEQ ID NO: 91; SEQ ID NO: 92; SEQ ID NO: 93; SEQ ID NO: 94; SEQ ID NO: 95; SEQ ID NO: 96; SEQ ID NO: 97; SEQ ID NO: 98; SEQ ID NO: 99; SEQ ID NO: 100; SEQ ID NO: 101; SEQ ID NO: 102; SEQ ID NO: 103; SEQ ID NO: 104; SEQ ID NO: 105; SEQ ID NO: 106; SEQ ID NO: 107; SEQ ID NO: 108; SEQ ID NO: 109; SEQ ID NO: 110; SEQ ID NO: 111; SEQ ID NO: 112; SEQ ID NO: 113; SEQ ID NO: 114; SEQ ID NO: 115; SEQ ID NO: 116; SEQ ID NO: 18; SEQ ID NO: 119; SEQ ID NO: 120; SEQ ID NO: 121; SEQ ID NO: 122; SEQ ID NO: 123; SEQ ID NO: 124; SEQ ID NO: 125; SEQ ID NO: 126; SEQ ID NO: 127; SEQ ID NO: 128; SEQ ID NO: 129; SEQ ID NO: 130; SEQ ID NO: 131; SEQ ID NO: 132; SEQ ID NO: 133; SEQ ID NO: 134; SEQ ID NO: 135; SEQ ID NO: 136; SEQ ID NO: 137; SEQ ID NO: 138; SEQ ID NO: 139; SEQ ID NO: 140; SEQ ID NO: 141; SEQ ID NO: 142; SEQ ID NO: 143; SEQ ID NO: 144; SEQ ID NO: 145; SEQ ID NO: 146; SEQ ID NO: 147; SEQ ID NO: 148; SEQ ID NO: 149; SEQ ID NO: 150; SEQ ID NO: 151; SEQ ID NO: 152; SEQ ID NO: 153; SEQ ID NO: 154; SEQ ID NO: 155; SEQ ID NO: 156; SEQ ID NO: 157; SEQ ID NO: 158; SEQ ID NO: 159; SEQ ID NO: 160; SEQ ID NO: 161; SEQ ID NO: 162; SEQ ID NO: 163; SEQ ID NO: 164; SEQ ID NO: 165; SEQ ID NO: 166; SEQ ID NO: 167; SEQ ID NO: 168; SEQ ID NO: 169; SEQ ID NO: 170; SEQ ID NO: 171; SEQ ID NO: 172; SEQ ID NO: 173; SEQ ID NO: 174; SEQ ID NO: 175; SEQ ID NO: 176; SEQ ID NO: 177; SEQ ID NO: 178; SEQ ID NO: 179; SEQ ID NO: 180; SEQ ID NO: 181; SEQ ID NO: 182; SEQ ID NO: 183; SEQ ID NO: 184; SEQ ID NO: 185; and SEQ ID NO: 186.

[0301] The present invention also provides a microarray comprising an epithelial cell gene expression profile comprising one or more nucleic acid sequences substantially homlogous to a nucleic acid sequence or complementary sequence thereof, or portions of said nucleic acid sequence or complementary sequence thereof, selected from the group consisting of SEQ ID NO: 47; SEQ ID NO: 60; SEQ ID NO: 67; SEQ ID NO: 73; SEQ ID NO: 75; SEQ ID NO: 76; SEQ ID NO: 77; SEQ ID NO: 78; SEQ ID NO: 80; SEQ ID NO: 96; SEQ ID NO: 98; SEQ ID NO: 99; SEQ ID NO: 111; SEQ ID NO: 112; SEQ ID NO: 123; SEQ ID NO: 127; SEQ ID NO: 131; SEQ ID NO: 150; SEQ ID NO: 153; SEQ ID NO: 154; SEQ ID NO: 155; SEQ ID NO: 156; SEQ ID NO: 157; SEQ ID NO: 158; SEQ ID NO: 159; SEQ ID NO: 160; SEQ ID NO: 161; SEQ ID NO: 162; SEQ ID NO: 163; SEQ ID NO: 164; SEQ ID NO: 165; SEQ ID NO: 166; SEQ ID NO: 167; SEQ ID NO: 168; SEQ ID NO: 169; SEQ ID NO: 170; SEQ ID NO: 171; SEQ ID NO: 172; SEQ ID NO: 173; SEQ ID NO: 174; SEQ ID NO: 175; SEQ ID NO: 176; SEQ ID NO: 177; SEQ ID NO: 178; SEQ ID NO: 179; SEQ ID NO: 180; SEQ ID NO: 181; SEQ ID NO: 182; SEQ ID NO: 183; SEQ ID NO: 184; SEQ ID NO: 185; and SEQ ID NO: 186.

[0302] In yet another embodiment, a microarray may comprise a keratinocyte epithelial cell gene expression profile comprising one or more nucleic acid sequences substantially homlogous to a nucleic acid sequence or complementary sequence thereof, or portions of said nucleic acid sequence or complementary sequence thereof, selected from the group consisting of SEQ ID NO: 187; SEQ ID NO: 188; SEQ ID NO: 189; SEQ ID NO: 190; SEQ ID NO: 191; SEQ ID NO: 192; SEQ ID NO: 193; SEQ ID NO: 194; SEQ ID NO: 195; SEQ ID NO: 196; SEQ ID NO: 197; SEQ ID NO: 198; SEQ ID NO: 199; SEQ ID NO: 200; SEQ ID NO: 201; SEQ ID NO: 202; SEQ ID NO: 203; SEQ ID NO: 204; SEQ ID NO: 205; SEQ ID NO: 206; SEQ ID NO: 207; SEQ ID NO: 208; SEQ ID NO: 209; SEQ ID NO: 210; and SEQ ID NO: 211.

[0303] The present invention also provides a microarray comprising a mammary epithelial cell gene expression profile comprising one or more nucleic acid sequences substantially homlogous to a nucleic acid sequence or complementary sequence thereof, or portions of said nucleic acid sequence or complementary sequence thereof, selected from the group consisting of SEQ ID NO: 78; SEQ ID NO: 212; SEQ ID NO: 213; SEQ ID NO: 216; SEQ TD NO: 225; SEQ ID NO: 226; SEQ ID NO: 227; SEQ ID NO: 239; SEQ ID NO: 271; SEQ ID NO: 285; and SEQ ID NO: 289.

[0304] In an alternative embodiment, a microarray may comprise a bronchial epithelial cell gene expression profile comprising one or more nucleic acid sequences substantially homlogous to a nucleic acid sequence or complementary sequence thereof, or portions of said nucleic acid sequence or complementary sequence thereof, selected from the group consisting of SEQ ID NO: 27; SEQ ID NO: 131; SEQ ID NO: 150; SEQ ID NO: 169; SEQ ID NO: 214; SEQ ID NO: 215; SEQ ID NO: 223; SEQ ID NO: 224; SEQ ID NO: 241; SEQ ID NO: 243; SEQ ID NO: 244; SEQ ID NO: 255; SEQ ID NO: 256; SEQ ID NO: 261; and SEQ ID NO: 314.

[0305] The present invention also provides a microarray comprising a prostate epithelial cell gene expression profile comprising one or more nucleic acid sequences substantially homlogous to a nucleic acid sequence or complementary sequence thereof, or portions of said nucleic acid sequence or complementary sequence thereof, selected from the group consisting of SEQ ID NO: 64; SEQ ID NO: 217; SEQ ID NO: 218; SEQ ID NO: 259; SEQ ID NO: 293; SEQ ID NO: 302; and SEQ ID NO: 320.

[0306] In yet another embodiment, a microarray comprises a renal cortical epithelial cell gene expression profile comprising one or more nucleic acid sequences substantially homlogous to a nucleic acid sequence or complementary sequence thereof, or portions of said nucleic acid sequence or complementary sequence thereof, selected from the group consisting of SEQ ID NO: 49; SEQ ID NO: 57; SEQ ID NO: 104; SEQ ID NO: 123; SEQ ID NO: 160; SEQ ID NO: 165; SEQ ID NO: 166; SEQ ID NO: 219; SEQ ID NO: 267; SEQ ID NO: 270; SEQ ID NO: 279; SEQ ID NO: 280; SEQ ID NO: 283; SEQ ID NO: 291; SEQ ID NO: 305; SEQ ID NO: 307; SEQ ID NO: 310; SEQ ID NO: 313; SEQ ID NO: 325; SEQ ID NO: 326; and SEQ ID NO: 327.

[0307] The present invention further provides a microarray comprising one or more nucleic acid sequences substantially homlogous to a nucleic acid sequence or complementary sequence thereof, or portions of said nucleic acid sequence or complementary sequence thereof, selected from the group consisting of SEQ ID NO: 106; SEQ ID NO: 138; SEQ ID NO: 158; SEQ ID NO: 228; SEQ ID NO: 236; SEQ ID NO: 242; SEQ ID NO: 250; SEQ ID NO: 258; SEQ ID NO: 260; SEQ ID NO: 262; SEQ ID NO: 266; SEQ ID NO: 272; SEQ ID NO: 273; SEQ ID NO: 274; SEQ ID NO: 275; SEQ ID NO: 276; SEQ ID NO: 278; SEQ ID NO: 284; SEQ ID NO: 288; SEQ ID NO: 295; SEQ ID NO: 296; SEQ ID NO: 297; SEQ ID NO: 299; SEQ ID NO: 300; SEQ ID NO: 301; SEQ ID NO: 306; SEQ ID NO: 308; SEQ ID NO: 309; SEQ ID NO: 311; SEQ ID NO: 316; SEQ ID NO: 318; SEQ ID NO: 321; SEQ ID NO: 322; SEQ ID NO: 328; and SEQ ID NO: 329.

[0308] In a specific embodiment, a microarray may comprise a small airway epithelial cell gene expression profile comprising one or more nucleic acid sequences substantially homlogous to a nucleic acid sequence or complementary sequence thereof, or portions of said nucleic acid sequence or complementary sequence thereof, selected from the group consisting of SEQ ID NO: 173; SEQ ID NO: 174; SEQ ID NO: 183; SEQ ID NO: 220; SEQ ID NO: 221; SEQ ID NO: 222; SEQ ID NO: 229; SEQ ID NO: 230; SEQ ID NO: 231; SEQ ID NO: 232; SEQ ID NO: 233; SEQ ID NO: 234; SEQ ID NO: 235; SEQ ID NO: 237; SEQ ID NO: 238; SEQ ID NO: 240; SEQ ID NO: 245; SEQ ID NO: 246; SEQ ID NO: 247; SEQ ID NO: 248; SEQ ID NO: 249; SEQ ID NO: 251; SEQ ID NO: 252; SEQ ID NO: 254; SEQ ID NO: 257; SEQ ID NO: 263; SEQ ID NO: 264; SEQ ID NO: 265; SEQ ID NO: 268; SEQ ID NO: 269; SEQ ID NO: 270; SEQ ID NO: 277; SEQ ID NO: 281; SEQ ID NO: 282; SEQ ID NO: 286; SEQ ID NO: 287; SEQ ID NO: 290; SEQ ID NO: 294; SEQ ID NO: 298; SEQ ID NO: 303; SEQ ID NO: 312; SEQ ID NO: 315; SEQ ID NO: 317; and SEQ ID NO: 319.

[0309] The present invention also provides a microarray comprising one or more nucleic acid sequences substantially homlogous to a nucleic acid sequence or complementary sequence thereof, or portions of said nucleic acid sequence or complementary sequence thereof, selected from the group consisting of SEQ ID NO: 37; SEQ ID NO: 253; SEQ ID NO: 304; SEQ ID NO: 323; and SEQ ID NO: 324.

[0310] In yet another embodiment, a microarray may comprise one or more nucleic acid sequences substantially homlogous to a nucleic acid sequence or complementary sequence thereof, or portions of said nucleic acid sequence or complementary sequence thereof, selected from the group consisting of SEQ ID NO: 27; SEQ ID NO: 37; SEQ ID NO: 49; SEQ ID NO: 57; SEQ ID NO: 64; SEQ ID NO: 70; SEQ ID NO: 78; SEQ ID NO: 104; SEQ ID NO: 106; SEQ ID NO: 123; SEQ ID NO: 131; SEQ ID NO: 138; SEQ ID NO: 150; SEQ ID NO: 158; SEQ ID NO: 160; SEQ ID NO: 165; SEQ ID NO: 166; SEQ ID NO: 169; SEQ ID NO: 173; SEQ ID NO: 174; SEQ ID NO: 183; SEQ ID NO: 187; SEQ ID NO: 188; SEQ ID NO: 189; SEQ ID NO: 190; SEQ ID NO: 191; SEQ ID NO: 192; SEQ ID NO: 193; SEQ ID NO: 194; SEQ ID NO: 195; SEQ ID NO: 196; SEQ ID NO: 197; SEQ ID NO: 198; SEQ ID NO: 199; SEQ ID NO: 200; SEQ ID NO: 201; SEQ ID NO: 202; SEQ ID NO: 203; SEQ ID NO: 204; SEQ ID NO: 205; SEQ ID NO: 206; SEQ ID NO: 207; SEQ ID NO: 208; SEQ ID NO: 209; SEQ ID NO: 210; SEQ ID NO: 211; SEQ ID NO: 212; SEQ ID NO: 213; SEQ ID NO: 214; SEQ ID NO: 215; SEQ ID NO: 216; SEQ ID NO: 217; SEQ ID NO: 218; SEQ ID NO: 219; SEQ ID NO: 220; SEQ ID NO: 221; SEQ ID NO: 222; SEQ ID NO: 223; SEQ ID NO: 224; SEQ ID NO: 225; SEQ ID NO: 226; SEQ ID NO: 227; SEQ ID NO: 228; SEQ ID NO: 229; SEQ ID NO: 230; SEQ ID NO: 231; SEQ ID NO: 232; SEQ ID NO: 233; SEQ ID NO: 234; SEQ ID NO: 235; SEQ ID NO: 236; SEQ ID NO: 237; SEQ ID NO: 238; SEQ ID NO: 239; SEQ ID NO: 240; SEQ ID NO: 241; SEQ ID NO: 242; SEQ ID NO: 243; SEQ ID NO: 244; SEQ ID NO: 245; SEQ ID NO: 246; SEQ ID NO: 247; SEQ ID NO: 248; SEQ ID NO: 249; SEQ ID NO: 250; SEQ ID NO: 251; SEQ ID NO: 252; SEQ ID NO: 253; SEQ ID NO: 254; SEQ ID NO: 255; SEQ ID NO: 256; SEQ ID NO: 257; SEQ ID NO: 258; SEQ ID NO: 259; SEQ ID NO: 260; SEQ ID NO: 261; SEQ ID NO: 262; SEQ ID NO: 263; SEQ ID NO: 264; SEQ ID NO: 265; SEQ ID NO: 266; SEQ ID NO: 267; SEQ ID NO: 268; SEQ ID NO: 269; SEQ ID NO: 270; SEQ ID NO: 271; SEQ ID NO: 272; SEQ ID NO: 273; SEQ ID NO: 274; SEQ ID NO: 275; SEQ ID NO: 276; SEQ ID NO: 277; SEQ ID NO: 278; SEQ ID NO: 279; SEQ ID NO: 280; SEQ ID NO: 281; SEQ ID NO: 282; SEQ ID NO: 283; SEQ ID NO: 284; SEQ ID NO: 285; SEQ ID NO: 286; SEQ ID NO: 287; SEQ ID NO: 288; SEQ ID NO: 289; SEQ ID NO: 290; SEQ ID NO: 291; SEQ ID NO: 293; SEQ ID NO: 294; SEQ ID NO: 295; SEQ ID NO: 296; SEQ ID NO: 297; SEQ ID NO: 298; SEQ ID NO: 299; SEQ ID NO: 300; SEQ ID NO: 301; SEQ ID NO: 302; SEQ ID NO: 303; SEQ ID NO: 304; SEQ ID NO: 305; SEQ ID NO: 306; SEQ ID NO: 307; SEQ ID NO: 308; SEQ ID NO: 309; SEQ ID NO: 310; SEQ ID NO: 311; SEQ ID NO: 312; SEQ ID NO: 313; SEQ ID NO: 314; SEQ ID NO: 315; SEQ ID NO: 316; SEQ ID NO: 317; SEQ ID NO: 318; SEQ ID NO: 320; SEQ ID NO: 321; SEQ ID NO: 322; SEQ ID NO: 323; SEQ ID NO: 324; SEQ ID NO: 325; SEQ ID NO: 326; SEQ ID NO: 327; SEQ ID NO: 328; and SEQ ID NO: 329.

[0311] In a specific embodiment, the present invention provides a microarray comprising one or more protein-capture agents that bind one or more amino acid sequences encoded by all or a portion of one or more nucleic acid sequences selected from the group consisting of SEQ ID NO: 1; SEQ ID NO: 2; SEQ ID NO: 3; SEQ ID NO: 4; SEQ ID NO: 5; SEQ ID NO: 6; SEQ ID NO: 7; SEQ ID NO: 8; SEQ ID NO: 9; SEQ ID NO: 10; SEQ ID NO: 11; SEQ ID NO: 12; SEQ ID NO: 13; SEQ ID NO: 14; SEQ ID NO: 15; SEQ ID NO: 16; SEQ ID NO: 17; SEQ ID NO: 18; SEQ ID NO: 19; SEQ ID NO: 20; SEQ ID NO: 21; SEQ ID NO: 22; SEQ ID NO: 23; SEQ ID NO: 48; SEQ ID NO: 63; SEQ ID NO: 70; SEQ ID NO: 82; SEQ ID NO: 94; and SEQ ID NO: 144.

[0312] In another embodiment, a microarray may comprise one or more protein-capture agents that bind one or more amino acid sequences encoded by all or a portion of one or more nucleic acid sequences selected from the group consisting of SEQ ID NO: 24; SEQ ID NO: 25; SEQ ID NO: 26; SEQ ID NO: 27; SEQ ID NO: 28; SEQ ID NO: 29; SEQ ID NO: 30; SEQ ID NO: 31; SEQ ID NO: 32; SEQ ID NO: 33; SEQ ID NO: 34; SEQ ID NO: 35; SEQ ID NO: 36; SEQ ID NO: 37; SEQ ID NO: 39; SEQ ID NO: 40; SEQ ID NO: 41; SEQ ID NO: 42; SEQ ID NO: 54; SEQ ID NO: 55; and SEQ ID NO: 69.

[0313] In an alternative embodiment, a microarray comprises one or more protein-capture agents that bind one or more amino acid sequences encoded by all or a portion of one or more nucleic acid sequences selected from the group consisting of SEQ ID NO: 1; SEQ ID NO: 2; SEQ ID NO: 3; SEQ ID NO: 4; SEQ ID NO: 5; SEQ ID NO: 6; SEQ ID NO: 7; SEQ ID NO: 8; SEQ ID NO: 9; SEQ ID NO: 10; SEQ ID NO: 11; SEQ ID NO: 12; SEQ ID NO: 13; SEQ ID NO: 14; SEQ ID NO: 15; SEQ ID NO: 16; SEQ ID NO: 17; SEQ ID NO: 18; SEQ ID NO: 19; SEQ ID NO: 20; SEQ ID NO: 21; SEQ ID NO: 22; SEQ ID NO: 23; SEQ ID NO: 24; SEQ ID NO: 25; SEQ ID NO: 26; SEQ ID NO: 27; SEQ ID NO: 28; SEQ ID NO: 29; SEQ ID NO: 30; SEQ ID NO: 31; SEQ ID NO: 32; SEQ ID NO: 33; SEQ ID NO: 34; SEQ ID NO: 35; SEQ ID NO: 36; SEQ ID NO: 37; SEQ ID NO: 39; SEQ ID NO: 40; SEQ ID NO: 41; SEQ ID NO: 42; SEQ ID NO: 43; SEQ ID NO: 44; SEQ ID NO: 45; SEQ ID NO: 46; SEQ ID NO: 47; SEQ ID NO: 48; SEQ ID NO: 49; SEQ ID NO: 50; SEQ ID NO: 51; SEQ ID NO: 52; SEQ ID NO: 53; SEQ ID NO: 54; SEQ ID NO: 55; SEQ ID NO: 56; SEQ ID NO: 57; SEQ ID NO: 58; SEQ ID NO: 59; SEQ ID NO: 60; SEQ ID NO: 61; SEQ ID NO: 62; SEQ ID NO: 63; SEQ ID NO: 64; SEQ ID NO: 65; SEQ ID NO: 66; SEQ ID NO: 67; SEQ ID NO: 68; SEQ ID NO: 69; SEQ ID NO: 70; SEQ ID NO: 71; SEQ ID NO: 72; SEQ ID NO: 73; SEQ ID NO: 74; SEQ ID NO: 75; SEQ ID NO: 76; SEQ ID NO: 77; SEQ ID NO: 78; SEQ ID NO: 79; SEQ ID NO: 80; SEQ ID NO: 81; SEQ ID NO: 82; SEQ ID NO: 83; SEQ ID NO: 84; SEQ ID NO: 85; SEQ ID NO: 86; SEQ ID NO: 87; SEQ ID NO: 88; SEQ ID NO: 89; SEQ ID NO: 90; SEQ ID NO: 91; SEQ ID NO: 92; SEQ ID NO: 93; SEQ ID NO: 94; SEQ ID NO: 95; SEQ ID NO: 96; SEQ ID NO: 97; SEQ ID NO: 98; SEQ ID NO: 99; SEQ ID NO: 100; SEQ ID NO: 101; SEQ ID NO: 102; SEQ ID NO: 103; SEQ ID NO: 104; SEQ ID NO: 105; SEQ ID NO: 106; SEQ ID NO: 107; SEQ ID NO: 108; SEQ ID NO: 109; SEQ ID NO: 110; SEQ ID NO: 111; SEQ ID NO: 112; SEQ ID NO: 113; SEQ ID NO: 114; SEQ ID NO: 115; SEQ ID NO: 116; SEQ ID NO: 118; SEQ ID NO: 119; SEQ ID NO: 120; SEQ ID NO: 121; SEQ ID NO: 122; SEQ ID NO: 123; SEQ ID NO: 124; SEQ ID NO: 125; SEQ ID NO: 126; SEQ ID NO: 127; SEQ ID NO: 128; SEQ ID NO: 129; SEQ ID NO: 130; SEQ ID NO: 131; SEQ ID NO: 132; SEQ ID NO: 133; SEQ ID NO: 134; SEQ ID NO: 135; SEQ ID NO: 136; SEQ ID NO: 137; SEQ ID NO: 138; SEQ ID NO: 139; SEQ ID NO: 140; SEQ ID NO: 141; SEQ ID NO: 142; SEQ ID NO: 143; SEQ ID NO: 144; SEQ ID NO: 145; SEQ ID NO: 146; SEQ ID NO: 147; SEQ ID NO: 148; SEQ ID NO: 149; SEQ ID NO: 150; SEQ ID NO: 151; SEQ ID NO:. 152; SEQ ID NO: 153; SEQ ID NO: 154; SEQ ID NO: 155; SEQ ID NO: 156; SEQ ID NO: 157; SEQ ID NO: 158; SEQ ID NO: 159; SEQ ID NO: 160; SEQ ID NO: 161; SEQ ID NO: 162; SEQ ID NO: 163; SEQ ID NO: 164; SEQ ID NO: 165; SEQ ID NO: 166; SEQ ID NO: 167; SEQ ID NO: 168; SEQ ID NO: 169; SEQ ID NO: 170; SEQ ID NO: 171; SEQ ID NO: 172; SEQ ID NO: 173; SEQ ID NO: 174; SEQ ID NO: 175; SEQ ID NO: 176; SEQ ID NO: 177; SEQ ID NO: 178; SEQ ID NO: 179; SEQ ID NO: 180; SEQ ID NO: 181; SEQ ID NO: 182; SEQ ID NO: 183; SEQ ID NO: 184; SEQ ID NO: 185; and SEQ ID NO: 186.

[0314] The present invention also provides a microarray comprising one or more protein-capture agents that bind one or more amino acid sequences encoded by all or a portion of one or more nucleic acid sequences selected from the group consisting of SEQ ID NO: 47; SEQ ID NO: 60; SEQ ID NO: 67; SEQ ID NO: 73; SEQ ID NO: 75; SEQ ID NO: 76; SEQ ID NO: 77; SEQ ID NO: 78; SEQ ID NO: 80; SEQ ID NO: 96; SEQ ID NO: 98; SEQ ID NO: 99; SEQ ID NO: 111; SEQ ID NO: 112; SEQ ID NO: 123; SEQ ID NO: 127; SEQ ID NO: 131; SEQ ID NO: 150; SEQ ID NO: 153; SEQ ID NO: 154; SEQ ID NO: 155; SEQ ID NO: 156; SEQ ID NO: 157; SEQ ID NO: 158; SEQ ID NO: 159; SEQ ID NO: 160; SEQ ID NO: 161; SEQ ID NO: 162; SEQ ID NO: 163; SEQ ID NO: 164; SEQ ID NO: 165; SEQ ID NO: 166; SEQ ID NO: 167; SEQ ID NO: 168; SEQ ID NO: 169; SEQ ID NO: 170; SEQ ID NO: 171; SEQ ID NO: 172; SEQ ID NO: 173; SEQ ID NO: 174; SEQ ID NO: 175; SEQ ID NO: 176; SEQ ID NO: 177; SEQ ID NO: 178; SEQ ID NO: 179; SEQ ID NO: 180; SEQ ID NO: 181; SEQ ID NO: 182; SEQ ID NO: 183; SEQ ID NO: 184; SEQ ID NO: 185; and SEQ ID NO: 186.

[0315] In yet another embodiment, a microarray may comprise one or more protein-capture agents that bind one or more amino acid sequences encoded by all or a portion of one or more nucleic acid sequences selected from the group consisting of SEQ ID NO: 187; SEQ ID NO: 188; SEQ ID NO: 189; SEQ ID NO: 190; SEQ ID NO: 191; SEQ ID NO: 192; SEQ ID NO: 193; SEQ ID NO: 194; SEQ ID NO: 195; SEQ ID NO: 196; SEQ ID NO: 197; SEQ ID NO: 198; SEQ ID NO: 199; SEQ ID NO: 200; SEQ ID NO: 201; SEQ ID NO: 202; SEQ ID NO: 203; SEQ ID NO: 204; SEQ ID NO: 205; SEQ ID NO: 206; SEQ ID NO: 207; SEQ ID NO: 208; SEQ ID NO: 209; SEQ ID NO: 210; and SEQ ID NO: 211.

[0316] The present invention also provides a microarray comprising one or more protein-capture agents that bind one or more amino acid sequences encoded by all or a portion of one or more nucleic acid sequences selected from the group consisting of SEQ ID NO: 78; SEQ ID NO: 212; SEQ ID NO: 213; SEQ ID NO: 216; SEQ ID NO: 225; SEQ ID NO: 226; SEQ ID NO: 227; SEQ ID NO: 239; SEQ ID NO: 271; SEQ ID NO: 285; and SEQ ID NO: 289.

[0317] In an alternative embodiment, a microarray may comprise one or more protein-capture agents that bind one or more amino acid sequences encoded by all or a portion of one or more nucleic acid sequences selected from the group consisting of SEQ ID NO: 27; SEQ ID NO: 131; SEQ ID NO: 150; SEQ ID NO: 169; SEQ ID NO: 214; SEQ ID NO: 215; SEQ ID NO: 223; SEQ ID NO: 224; SEQ ID NO: 241; SEQ ID NO: 243; SEQ ID NO: 244; SEQ ID NO: 255; SEQ ID NO: 256; SEQ ID NO: 261; and SEQ ID NO: 314.

[0318] The present invention also provides a microarray comprising one or more protein-capture agents that bind one or more amino acid sequences encoded by all or a portion of one or more nucleic acid sequences selected from the group consisting of SEQ ID NO: 64; SEQ ID NO: 217; SEQ ID NO: 218; SEQ ID NO: 259; SEQ ID NO: 293; SEQ ID NO: 302; and SEQ ID NO: 320.

[0319] In yet another embodiment, a microarray comprises one or more protein-capture agents that bind one or more amino acid sequences encoded by all or a portion of one or more nucleic acid sequences selected from the group consisting of SEQ ID NO: 49; SEQ ID NO: 57; SEQ ID NO: 104; SEQ ID NO: 123; SEQ ID NO: 160; SEQ ID NO: 165; SEQ ID NO: 166; SEQ ID NO: 219; SEQ ID NO: 267; SEQ ID NO: 270; SEQ ID NO: 279; SEQ ID NO: 280; SEQ ID NO: 283; SEQ ID NO: 291; SEQ ID NO: 305; SEQ ID NO: 307; SEQ ID NO: 310; SEQ ID NO: 313; SEQ ID NO: 325; SEQ ID NO: 326; and SEQ ID NO: 327.

[0320] The present invention further provides a microarray comprising one or more protein-capture agents that bind one or more amino acid sequences encoded by all or a portion of one or more nucleic acid sequences selected from the group consisting of SEQ ID NO: 106; SEQ ID NO: 138; SEQ ID NO: 158; SEQ ID NO: 228; SEQ ID NO: 236; SEQ ID NO: 242; SEQ ID NO: 250; SEQ ID NO: 258; SEQ ID NO: 260; SEQ ID NO: 262; SEQ ID NO: 266; SEQ ID NO: 272; SEQ ID NO: 273; SEQ ID NO: 274; SEQ ID NO: 275; SEQ ID NO: 276; SEQ ID NO: 278; SEQ ID NO: 284; SEQ ID NO: 288; SEQ ID NO: 295; SEQ ID NO: 296; SEQ ID NO: 297; SEQ ID NO: 299; SEQ ID NO: 300; SEQ ID NO: 301; SEQ ID NO: 306; SEQ ID NO: 308; SEQ ID NO: 309; SEQ ID NO: 311; SEQ ID NO: 316; SEQ ID NO: 318; SEQ ID NO: 321; SEQ ID NO: 322; SEQ ID NO: 328; and SEQ ID NO: 329.

[0321] In a specific embodiment, a microarray may comprise one or more protein-capture agents that bind one or more amino acid sequences encoded by all or a portion of one or more nucleic acid sequences selected from the group consisting of SEQ ID NO: 173; SEQ ID NO: 174; SEQ ID NO: 183; SEQ ID NO: 220; SEQ ID NO: 221; SEQ ID NO: 222; SEQ ID NO: 229; SEQ ID NO: 230; SEQ ID NO: 231; SEQ ID NO: 232; SEQ ID NO: 233; SEQ ID NO: 234; SEQ ID NO: 235; SEQ ID NO: 237; SEQ ID NO: 238; SEQ ID NO: 240; SEQ ID NO: 245; SEQ ID NO: 246; SEQ ID NO: 247; SEQ ID NO: 248; SEQ ID NO: 249; SEQ ID NO: 251; SEQ ID NO: 252; SEQ ID NO: 254; SEQ ID NO: 257; SEQ ID NO: 263; SEQ ID NO: 264; SEQ ID NO: 265; SEQ ID NO: 268; SEQ ID NO: 269; SEQ ID NO: 270; SEQ ID NO: 277; SEQ ID NO: 281; SEQ ID NO: 282; SEQ ID NO: 286; SEQ ID NO: 287; SEQ ID NO: 290; SEQ ID NO: 294; SEQ ID NO: 298; SEQ ID NO: 303; SEQ ID NO: 312; SEQ ID NO: 315; SEQ ID NO: 317; and SEQ ID NO: 319.

[0322] The present invention also provides a microarray comprising one or more protein-capture agents that bind one or more amino acid sequences encoded by all or a portion of one or more nucleic acid sequences selected from the group consisting of SEQ ID NO: 37; SEQ ID NO: 253; SEQ ID NO: 304; SEQ ID NO: 323; and SEQ ID NO: 324.

[0323] In yet another embodiment, a microarray may comprise one or more protein-capture agents that substantially bind one or more amino acid sequences encoded by all or a portion of one or more nucleic acid sequences selected from the group consisting of SEQ ID NO: 27; SEQ ID NO: 37; SEQ ID NO: 49; SEQ ID NO: 57; SEQ ID NO: 64; SEQ ID NO: 70; SEQ ID NO: 78; SEQ ID NO: 104; SEQ ID NO: 106; SEQ ID NO: 123; SEQ ID NO: 131; SEQ ID NO: 138; SEQ ID NO: 150; SEQ ID NO: 158; SEQ ID NO: 160; SEQ ID NO: 165; SEQ ID NO: 166; SEQ ID NO: 169; SEQ ID NO: 173; SEQ ID NO: 174; SEQ ID NO: 183; SEQ ID NO: 187; SEQ ID NO: 188; SEQ ID NO: 189; SEQ ID NO: 190; SEQ ID NO: 191; SEQ ID NO: 192; SEQ ID NO: 193; SEQ ID NO: 194; SEQ ID NO: 195; SEQ ID NO: 196; SEQ ID NO: 197; SEQ ID NO: 198; SEQ ID NO: 199; SEQ ID NO: 200; SEQ ID NO: 201; SEQ ID NO: 202; SEQ ID NO: 203; SEQ ID NO: 204; SEQ ID NO: 205; SEQ ID NO: 206; SEQ ID NO: 207; SEQ ID NO: 208; SEQ ID NO: 209; SEQ ID NO: 210; SEQ ID NO: 211; SEQ ID NO: 212; SEQ ID NO: 213; SEQ ID NO: 214; SEQ ID NO: 215; SEQ ID NO: 216; SEQ ID NO: 217; SEQ ID NO: 218; SEQ ID NO: 219; SEQ ID NO: 220; SEQ ID NO: 221; SEQ ID NO: 222; SEQ ID NO: 223; SEQ ID NO: 224; SEQ ID NO: 225; SEQ ID NO: 226; SEQ ID NO: 227; SEQ ID NO: 228; SEQ ID NO: 229; SEQ ID NO: 230; SEQ ID NO: 231; SEQ ID NO: 232; SEQ ID NO: 233; SEQ ID NO: 234; SEQ ID NO: 235; SEQ ID NO: 236; SEQ ID NO: 237; SEQ ID NO: 238; SEQ ID NO: 239; SEQ ID NO: 240; SEQ ID NO: 241; SEQ ID NO: 242; SEQ ID NO: 243; SEQ ID NO: 244; SEQ ID NO: 245; SEQ ID NO: 246; SEQ ID NO: 247; SEQ ID NO: 248; SEQ ID NO: 249; SEQ ID NO: 250; SEQ ID NO: 251; SEQ ID NO: 252; SEQ ID NO: 253; SEQ ID NO: 254; SEQ ID NO: 255; SEQ ID NO: 256; SEQ ID NO: 257; SEQ ID NO: 258; SEQ ID NO: 259; SEQ ID NO: 260; SEQ ID NO: 261; SEQ ID NO: 262; SEQ ID NO: 263; SEQ ID NO: 264; SEQ ID NO: 265; SEQ ID NO: 266; SEQ ID NO: 267; SEQ ID NO: 268; SEQ ID NO: 269; SEQ ID NO: 270; SEQ ID NO: 271; SEQ ID NO: 272; SEQ ID NO: 273; SEQ ID NO: 274; SEQ ID NO: 275; SEQ ID NO: 276; SEQ ID NO: 277; SEQ ID NO: 278; SEQ ID NO: 279; SEQ ID NO: 280; SEQ ID NO: 281; SEQ ID NO: 282; SEQ ID NO: 283; SEQ ID NO: 284; SEQ ID NO: 285; SEQ ID NO: 286; SEQ ID NO: 287; SEQ ID NO: 288; SEQ ID NO: 289; SEQ ID NO: 290; SEQ ID NO: 291; SEQ ID NO: 293; SEQ ID NO: 294; SEQ ID NO: 295; SEQ ID NO: 296; SEQ ID NO: 297; SEQ ID NO: 298; SEQ ID NO: 299; SEQ ID NO: 300; SEQ ID NO: 301; SEQ ID NO: 302; SEQ ID NO: 303; SEQ ID NO: 304; SEQ ID NO: 305; SEQ ID NO: 306; SEQ ID NO: 307; SEQ ID NO: 308; SEQ ID NO: 309; SEQ ID NO: 310; SEQ ID NO: 311; SEQ ID NO: 312; SEQ ID NO: 313; SEQ ID NO: 314; SEQ ID NO: 315; SEQ ID NO: 316; SEQ ID NO: 317; SEQ ID NO: 318; SEQ ID NO: 320; SEQ ID NO: 321; SEQ ID NO: 322; SEQ ID NO: 323; SEQ ID NO: 324; SEQ ID NO: 325; SEQ ID NO: 326; SEQ ID NO: 327; SEQ ID NO: 328; and SEQ ID NO: 329

[0324] VII. Expression Profiles and Microarray Methods of Use

[0325] In one aspect, the present invention provides methods for the reproducible measurement and assessment of the expression of specific mRNAs or proteins in a specific set of cells. One method combines and utilizes the techniques of laser capture microdissection, T7-based RNA amplification, production of cDNA from amplified RNA, and DNA microarrays containing immobilized DNA molecules for a wide variety of specific genes to produce a profile of gene expression analysis for very small numbers of specific cells. The desired cells are individually identified and attached to a substrate by the laser capture technique, and the captured cells are then separated from the remaining cells. RNA is then extracted from the captured cells and amplified about one million-fold using the T7-based amplification technique, and cDNA may be prepared from the amplified RNA. A wide variety of specific DNA molecules are prepared that hybridize with specific nucleic acids of the microarray, and the DNA molecules are immobilized on a suitable substrate. The cDNA made from the captured cells is applied to the microarray under conditions that allow hybridization of the cDNA to the immobilized DNA on the array. The expression profile of the captured cells is obtained from the analysis of the hybridization results using the amplified RNA or cDNA made from the amplified RNA of the captured cells, and the specific immobilized DNA molecules on the microarray. The hybridization results demonstrate, for example, which genes of those represented on the microarray as probes are hybridized to cDNA from the captured cells, and/or the amount of specific gene expression. The hybridization results represent the gene expression profile of the captured cells. The gene expression profile of the captured cells can be used to compare the gene expression profile of a different set of captured cells. The similarities and differences provide useful information for determining the differences in gene expression between different cell types, and differences between the same cell type under different conditions.

[0326] The techniques used for gene expression analysis are likewise applicable in the context of protein expression profiles. Total protein may be isolated from a cell sample and hybridized to a microarray comprising a plurality of protein-capture agents, which may include antibodies, receptor proteins, small molecules, and the like. Using any of several assays known in the art, hybridization may be detected and analyzed as described above. In the case of fluorescent detection, algorithms may be used to extract a protein expression profile representative of the particular cell type.

[0327] The present invention further relates to gene expression profiles and protein expression profiles that define a particular cell or tissue, or a particular cell or tissue state, e.g. a normal or diseased state. Such “cell type specific gene expression profiles” comprise genes that are only expressed in a particular cell, i.e., are differentially expressed between cells. Similarly, cell type specific protein expression profiles comprise proteins that are only expressed in a particular cell, i.e., are differentially expressed between cells. A cell type specific expression profile may define a particular cell type including its origin within the body and cellular state. For example, a cell type gene or protein expression profile may define an epithelial cell and more particularly, an epithelial cell located in a specific tissue, an epithelial cell at a specific stage of the cell cycle, an epithelial cell in a specific state of differentiation, an epithelial cell in an activated state, and/or an epithelial cell in a particular diseased state. Thus, the methodologies, microarrays, and algorithms of the present invention may be used to determine the phenotype of an unknown cell sample.

[0328] Moreover, all of the cell type specific gene and/or protein expression profiles may be compiled together in a database to be used for a variety of applications. For example, the profiles and the database may be used in methods for approximating cell type and cell number of a mixed population of cells. Armed with a database of cell type specific gene and/or protein expression profiles, a gene or protein expression profile constructed from a mixed population of cells may be compared against the profile database. Using the alogrithms of the present invention, a user may identify the number and type of cells comprising the mixed population.

[0329] In addition, the profiles and database may be used in creating cell type specific gene or protein microarrays. A microarray may be produced that comprises genes or protein-capture agents that represent all cell types or a specific set of cell types, for example, normal colon cells and cancerous colon cells at different stages of disease progression.

[0330] The gene expression profiles, protein expression profiles, microarrays, and algorithms of the present invention may also be used to differentiate cell types (e.g., neuron v. muscle cell). For example, mRNA isolated from two different cells may be hybridized to a microarray. The mRNA derived from each of the two cell types may be labeled with different fluorophores so that they may be distinguished. See e.g., Hacia et al., 26 NUCLEIC ACID RES. 3865-66, (1998); Schena et al., 270 SCIENCE 467-70 (1995). For example, mRNA from skeletal muscle cells may be synthesized using a fluorescein-12-UTP, and mRNA from neuronal cells, may be synthesized using biotin-16-UTP. The two mRNAs are then mixed and hybridized to the microarray. The mRNA from skeletal muscle cells will, for example, fluoresce green when the fluorophore is stimulated and the mRNA from neuronal cells will, for example, fluoresce red. The relative signal intensity from each mRNA is determined, and an expression profile for each mRNA is generated and used to identify the cell type. An advantage of using mRNA labeled with two different fluorophores is that a direct and internally controlled comparison of the mRNA levels corresponding to each arrayed gene in the two cell types can be made, and variations due to minor differences in experimental conditions (e.g., hybridization conditions) will not affect subsequent analyses.

[0331] In one aspect, the present invention provides gene and protein expression profile useful for identifying specific cell types. For example, the present invention contemplates gene and protein expression profiles generated from numerous cell types including, but not limited to, coronary artery endothelium, umbilical artery endothelium, umbilical vein endothelium, aortic endothelium, dermal microvascular endothelium, pulmonary artery endothelium, myometrium microvascular endothelium, keratinocyte epithelium, bronchial epithelium, mammary epithelium, prostate epithelium, renal cortical epithelium, renal proximal tubule epithelium, small airway epithelium, renal epithelium, umbilical artery smooth muscle, neonatal dermal fibroblast, pulmonary artery smooth muscle, dermal fibroblast, neural progenitor cells, skeletal muscle, astrocytes, aortic smooth muscle, mesangial cells, coronary artery smooth muscle, bronchial smooth muscle, uterine smooth muscle, lung fibroblast, osteoblasts, and prostate stromal cells.

[0332] Furthermore, the expression profiles and microarrays of the present invention may be used to distinguish normal tissue from diseased tissue, and in particular normal tissue from tumorgenic tissue. In addition, the present invention may also be used for patient diagnosis. Specifically, a patient sample may be hybridized to a microarray representing normal and diseased tissues. The resulting expression pattern of the patient sample may then be compared to the expression profile of a normal tissue sample to determine the disease progression status. For example, alterations in the level of expression of the prostrate-specific antigen (PSA) may be indicative of prostrate cancer and variations of the carcino-embryonic antigen (CEA) may be indicative of colon cancer.

[0333] The present invention also relates to methods of using the expression profiles and microarrays. For example, the gene expression profiles and protein expression profiles and microarrays may be used for drug and toxicity screening. Drugs often have side effects that are, in part, due to the lack of target specificity. In vitro assays provide limited information on the specificity of a compound. In contrast, a microarray may reveal the spectrum of genes or proteins affected by a particular drug compound. In considering two different compounds both of which demonstrate specificity for a target protein (e.g., a receptor), if one compound affects the expression of ten genes or proteins and a second compound affects the expression of fifty genes or proteins, the first compound is more likely to have fewer side effects. Because the identity of the genes or proteins is known or determinable, information on other affected genes is informative as to the nature of the side effects. A panel of genes or proteins may be used to test derivatives of a lead compound to determine which of the derivatives have greater specificity than the first compound.

[0334] Thus, microarray technology may be used to identify drug compounds that regulate gene and/or protein expression or possess similar mechanisms of action. This technology may also be used to create microarrays that model various diseases and in turn, novel drug compounds may be analyzed as potential therapeutics. In addition, microarrays may be generated that comprise the genes or proteins of one or more of a particular pathogen (e.g., bacteria, viruses, fungi). These microarrays may then be utilized to identify promising antibiotics, antiviral, or antifungal agents.

[0335] In another embodiment of the invention, a microarray corresponding to a population of genes or proteins isolated from a particular tissue or cell type is used to detect changes in gene transcription or protein expression which result from exposing the selected tissue or cells to a candidate drug. In this embodiment, tissue or cells derived from an organism, or an established cell line, may be exposed to the candidate drug in vivo or ex vivo. Thereafter, the gene transcripts, primarily mRNA, of the tissue or cells are isolated by methods well-known in the art. See, e.g., SAMBROOK ET AL. (1989). The isolated transcripts or cDNAs complementary to the mRNA are then contacted with a microarray, each microarray probe being specific for a different transcript, under conditions where the transcripts hybridize with a corresponding probe to form hybridization pairs. Similarly, protein may be isolated by methods well-known in the art. The isolated protein sample is then hybridized to a microarray comprising a plurality of protein-capture agents. The microarrays may provide, in aggregate, an ensemble of genes or proteins of the tissue or cell type sufficient to model the transcriptional and/or translational responsiveness of a drug candidate. A hybridization signal may then be detected at each hybridization pair to obtain an expression profile. This profile of the drug-stimulated cells may then be compared with anexpression profile of control cells to obtain a specific drug response profile.

[0336] Similarly, for toxicity screening, a cell line or animal (e.g., rat) may be treated with a particular toxin (e.g., carcinogen, immunotoxin, cytotoxin, teratogen, pesticide) to determine its effects on gene expression. As described above, RNA or protein may be isolated from the treated cell line or a tissue (e.g., liver) from the treated animal, and hybridized to a microarray containing oligonucleotide probes or protein-capture agents. The resulting expression profiles may be compared to profiles generated from an untreated animal or cell line. An analysis of the expression pattern of the treated samples may reflect the effects of the particular toxin on gene expression, and possibly predict physiological effects.

[0337] This data may be used to identify genetic response profiles. Individual gene or protein responses may be sorted to determine the specificity of each gene or protein to a particular stimulus. An expression profile may be established which weighs the signal patterns proportionally to the specificity of the response. Response profiles for an unknown stimulus (e.g., new chemicals, unknown compounds) may be analyzed by comparing the new stimulus response profiles with response profiles to known chemical stimuli. If there is a gene or protein match, then the response profile identifies a stimulus with the same target as one of the known compounds upon which the response profile database is based. For drug screening, if the response profile is a subset of cells in the support stimulated by a known compound, the new compound may be a candidate for a molecule with greater specificity than the reference compound.

[0338] Gene and/or protein expression profiles and microarrays may also be used to identify activating or non-activating compounds. Compounds that increase transcription rates or stimulate the activity of a protein are considered activating, and compounds that decrease rates or inhibit the activity of a protein are non-activating. The biological effects of a compound may be reflected in the biological state of a cell. This state is characterized by the cellular constituents. One aspect of the biological state of a cell is its transcriptional state. The transcriptional state of a cell includes the identities and amounts of the constituent RNA species, especially mRNAs, in the cell under a given set of conditions. Thus, the gene expression profiles, microarrays, and algorithms of the present invention may be used to analyze and characterize the transcriptional state of a given cell or tissue following exposure to an activating or non-activating compound.

[0339] The gene expression profiles, microarrays, and algorithms of the present invention may also be used to identify the components of cell signaling pathways. A cell signaling pathway is generally understood to be a collection of the cellular constituents (e.g., DNA, RNA, receptors, second messenger proteins, enzymes). The cellular constituents of a particular signaling pathway may be identified, for example, by variations in the transcription or translation rates. Each cellular constituent is typically influenced by at least one other cellular constituent. Thus, a cell may be exposed to a compound that interacts with a specific cellular constituent. For example, the cell may be exposed to varying concentrations of a specific receptor agonist. An analysis of variations in gene and/or protein expression as compared to an unexposed cell may reveal components of that particular receptor-signaling pathway. Thus, the cellular constituents that vary in a correlated pattern as the concentrations of the drug are increased may be identified as a component of the pathway originating at that drug.

[0340] The present invention may also be used to identify co-regulated genes. Similar variations in the transcriptional rate of a particular group of genes may reflect that these genes are similarly regulated. Thus, analysis of the transcriptional state of these genes may be accomplished by hybridization to microarrays. The level of hybridization to the microarray reflects the prevalence of the mRNA transcripts in the cell and may be used to determine if particular genes are co-regulated.

[0341] In another embodiment, the gene expression profiles and microarrays of the present invention may also be used to identify a class of diseases. For example, gene expression profiles or protein expression profiles may be used to distinguish tumor types (e.g., lymphomas). By monitoring gene or protein expression, it may be possible to distinguish, for example, Hodgkin lymphoma from non-Hodgkin lymphoma. By identifying the lymphoma type, the appropriate clinical course may be implemented.

[0342] In addition, new tumor-associated genes or proteins may be identified by systemically comparing the expression of genes in tumor specimens with their expression in control tissue. For example, genes with elevated levels in tumor cells relative to normal cells, are candidates for genes encoding growth-promoting products (e.g., oncogenes). In contrast, genes with reduced expression levels in tumors, are candidates for genes encoding growth-inhibiting products (e.g., tumor suppressor genes or genes encoding apoptosis-inducing products). Thus, the expression profiles may point to the physiological function or malfunction of the gene product in the organism and shed light on possible treatments.

[0343] In a specific embodiment, the present invention provides endothelial cell gene expression profiles comprising one or more nucleic acid sequences substantially homologous to a nucleic acid sequence or complementary sequence thereof selected from the group consisting of SEQ ID NO: 1; SEQ ID NO: 2; SEQ ID NO: 3; SEQ ID NO: 4; SEQ ID NO: 5; SEQ ID NO: 6; SEQ ID NO: 7; SEQ ID NO: 8; SEQ ID NO: 9; SEQ ID NO: 10; SEQ ID NO: 11; SEQ ID NO: 12; SEQ ID NO: 13; SEQ ID NO: 14; SEQ ID NO: 15; SEQ ID NO: 16; SEQ ID NO: 17; SEQ ID NO: 18; SEQ ID NO: 19; SEQ ID NO: 20; SEQ ID NO: 21; SEQ ID NO: 22; SEQ ID NO: 23; SEQ ID NO: 48; SEQ ID NO: 63; SEQ ID NO: 70; SEQ ID NO: 82; SEQ ID NO: 94; and SEQ ID NO: 144.

[0344] In another embodiment, a muscle cell gene expression profile may comprise one or more nucleic acid sequences substantially homologous to a nucleic acid sequence or complementary sequence thereof selected from the group consisting of SEQ ID NO: 24; SEQ ID NO: 25; SEQ ID NO: 26; SEQ ID NO: 27; SEQ ID NO: 28; SEQ ID NO: 29; SEQ ID NO: 30; SEQ ID NO: 31; SEQ ID NO: 32; SEQ ID NO: 33; SEQ ID NO: 34; SEQ ID NO: 35; SEQ ID NO: 36; SEQ ID NO: 37; SEQ ID NO: 39; SEQ ID NO: 40; SEQ ID NO: 41; SEQ ID NO: 42; SEQ ID NO: 54; SEQ ID NO: 55; and SEQ ID NO: 69.

[0345] In an alternative embodiment, a primary cell gene expression profile comprises one or more nucleic acid sequences substantially homologous to a nucleic acid sequence or complementary sequence thereof selected from the group consisting of SEQ ID NO: 1; SEQ ID NO: 2; SEQ ID NO: 3; SEQ ID NO: 4; SEQ ID NO: 5; SEQ ID NO: 6; SEQ ID NO: 7; SEQ ID NO: 8; SEQ ID NO: 9; SEQ ID NO: 10; SEQ ID NO: 1; SEQ ID NO: 12; SEQ ID NO: 13; SEQ ID NO: 14; SEQ ID NO: 15; SEQ ID NO: 16; SEQ ID NO: 17; SEQ ID NO: 18; SEQ ID NO: 19; SEQ ID NO: 20; SEQ ID NO: 21; SEQ ID NO: 22; SEQ ID NO: 23; SEQ ID NO: 24; SEQ ID NO: 25; SEQ ID NO: 26; SEQ ID NO: 27; SEQ ID NO: 28; SEQ ID NO: 29; SEQ ID NO: 30; SEQ ID NO: 31; SEQ ID NO: 32; SEQ ID NO: 33; SEQ ID NO: 34; SEQ ID NO: 35; SEQ ID NO: 36; SEQ ID NO: 37; SEQ ID NO: 39; SEQ ID NO: 40; SEQ ID NO: 41; SEQ ID NO: 42; SEQ ID NO: 43; SEQ ID NO: 44; SEQ ID NO: 45; SEQ ID NO: 46; SEQ ID NO: 47; SEQ ID NO: 48; SEQ ID NO: 49; SEQ ID NO: 50; SEQ ID NO: 51; SEQ ID NO: 52; SEQ ID NO: 53; SEQ ID NO: 54; SEQ ID NO: 55; SEQ ID NO: 56; SEQ ID NO: 57; SEQ ID NO: 58; SEQ ID NO: 59; SEQ ID NO: 60; SEQ ID NO: 61; SEQ ID NO: 62; SEQ ID NO: 63; SEQ ID NO: 64; SEQ ID NO: 65; SEQ ID NO: 66; SEQ ID NO: 67; SEQ ID NO: 68; SEQ ID NO: 69; SEQ ID NO: 70; SEQ ID NO: 71; SEQ ID NO: 72; SEQ ID NO: 73; SEQ ID NO: 74; SEQ ID NO: 75; SEQ ID NO: 76; SEQ ID NO: 77; SEQ ID NO: 78; SEQ ID NO: 79; SEQ ID NO: 80; SEQ ID NO: 81; SEQ ID NO: 82; SEQ ID NO: 83; SEQ ID NO: 84; SEQ ID NO: 85; SEQ ID NO: 86; SEQ ID NO: 87; SEQ ID NO: 88; SEQ ID NO: 89; SEQ ID NO: 90; SEQ ID NO: 91; SEQ ID NO: 92; SEQ ID NO: 93; SEQ ID NO: 94; SEQ ID NO: 95; SEQ ID NO: 96; SEQ ID NO: 97; SEQ ID NO: 98; SEQ ID NO: 99; SEQ ID NO: 100; SEQ ID NO: 101; SEQ ID NO: 102; SEQ ID NO: 103; SEQ ID NO: 104; SEQ ID NO: 105; SEQ ID NO: 106; SEQ ID NO: 107; SEQ ID NO: 108; SEQ ID NO: 109; SEQ ID NO: 110; SEQ ID NO: 101; SEQ ID NO: 112; SEQ ID NO: 113; SEQ ID NO: 114; SEQ ID NO: 115; SEQ ID NO: 116; SEQ ID NO: 118; SEQ ID NO: 119; SEQ ID NO: 120; SEQ ID NO: 121; SEQ ID NO: 122; SEQ ID NO: 123; SEQ ID NO: 124; SEQ ID NO: 125; SEQ ID NO: 126; SEQ ID NO: 127; SEQ ID NO: 128; SEQ ID NO: 129; SEQ ID NO: 130; SEQ ID NO: 131; SEQ ID NO: 132; SEQ ID NO: 133; SEQ ID NO: 134; SEQ ID NO: 135; SEQ ID NO: 136; SEQ ID NO: 137; SEQ ID NO: 138; SEQ ID NO: 139; SEQ ID NO: 140; SEQ ID NO: 141; SEQ ID NO: 142; SEQ ID NO: 143; SEQ ID NO: 144; SEQ ID NO: 145; SEQ ID NO: 146; SEQ ID NO: 147; SEQ ID NO: 148; SEQ ID NO: 149; SEQ ID NO: 150; SEQ ID NO: 151; SEQ ID NO: 152; SEQ ID NO: 153; SEQ ID NO: 154; SEQ ID NO: 155; SEQ ID NO: 156; SEQ ID NO: 157; SEQ ID NO: 158; SEQ ID NO: 159; SEQ ID NO: 160; SEQ ID NO: 161; SEQ ID NO: 162; SEQ ID NO: 163; SEQ ID NO: 164; SEQ ID NO: 165; SEQ ID NO: 166; SEQ ID NO: 167; SEQ ID NO: 168; SEQ ID NO: 169; SEQ ID NO: 170; SEQ ID NO: 171; SEQ ID NO: 172; SEQ ID NO: 173; SEQ ID NO: 174; SEQ ID NO: 175; SEQ ID NO: 176; SEQ ID NO: 177; SEQ ID NO: 178; SEQ ID NO: 179; SEQ ID NO: 180; SEQ ID NO: 181; SEQ ID NO: 182; SEQ ID NO: 183; SEQ ID NO: 184; SEQ ID NO: 185; and SEQ ID NO: 186.

[0346] The present invention also provides an epithelial cell gene expression profile comprising one or more nucleic acid sequences substantially homologous to a nucleic acid sequence or complementary sequence thereof selected from the group consisting of SEQ ID NO: 47; SEQ ID NO: 60; SEQ ID NO: 67; SEQ ID NO: 73; SEQ ID NO: 75; SEQ ID NO: 76; SEQ ID NO: 77; SEQ ID NO: 78; SEQ ID NO: 80; SEQ ID NO: 96; SEQ ID NO: 98; SEQ ID NO: 99; SEQ ID NO: 111; SEQ ID NO: 112; SEQ ID NO: 123; SEQ ID NO: 127; SEQ ID NO: 131; SEQ ID NO: 150; SEQ ID NO: 153; SEQ ID NO: 154; SEQ ID NO: 155; SEQ ID NO: 156; SEQ ID NO: 157; SEQ ID NO: 158; SEQ ID NO: 159; SEQ ID NO: 160; SEQ ID NO: 161; SEQ ID NO: 162; SEQ ID NO: 163; SEQ ID NO: 164; SEQ ID NO: 165; SEQ ID NO: 166; SEQ ID NO: 167; SEQ ID NO: 168; SEQ ID NO: 169; SEQ ID NO: 170; SEQ ID NO: 171; SEQ ID NO: 172; SEQ ID NO: 173; SEQ ID NO: 174; SEQ ID NO: 175; SEQ ID NO: 176; SEQ ID NO: 177; SEQ ID NO: 178; SEQ ID NO: 179; SEQ ID NO: 180; SEQ ID NO: 181; SEQ ID NO: 182; SEQ ID NO: 183; SEQ ID NO: 184; SEQ ID NO: 185; and SEQ ID NO: 186.

[0347] In yet another embodiment, a keratinocyte epithelial cell gene expression profile may comprise one or more nucleic acid sequences substantially homologous to a nucleic acid sequence or complementary sequence thereof selected from the group consisting of SEQ ID NO: 187; SEQ ID NO: 188; SEQ ID NO: 189; SEQ ID NO: 190; SEQ ID NO: 191; SEQ ID NO: 192; SEQ ID NO: 193; SEQ ID NO: 194; SEQ ID NO: 195; SEQ ID NO: 196; SEQ ID NO: 197; SEQ ID NO: 198; SEQ ID NO: 199; SEQ ID NO: 200; SEQ ID NO: 201; SEQ ID NO: 202; SEQ ID NO: 203; SEQ ID NO: 204; SEQ ID NO: 205; SEQ ID NO: 206; SEQ ID NO: 207; SEQ ID NO: 208; SEQ ID NO: 209; SEQ ID NO: 210; and SEQ ID NO: 211.

[0348] The present invention also provides a mammary epithelial cell gene expression profile comprising one or more nucleic acid sequences substantially homologous to a nucleic acid sequence or complementary sequence thereof selected from the group consisting of SEQ ID NO: 78; SEQ ID NO: 212; SEQ ID NO: 213; SEQ ID NO: 216; SEQ ID NO: 225; SEQ ID NO: 226; SEQ ID NO: 227; SEQ ID NO: 239; SEQ ID NO: 271; SEQ ID NO: 285; and SEQ ID NO: 289.

[0349] In an alternative embodiment, a bronchial epithelial cell gene expression profile may comprise one or more nucleic acid sequences substantially homologous to a nucleic acid sequence or complementary sequence thereof selected from the group consisting of SEQ ID NO: 27; SEQ ID NO: 131; SEQ ID NO: 150; SEQ ID NO: 169; SEQ ID NO: 214; SEQ ID NO: 215; SEQ ID NO: 223; SEQ ID NO: 224; SEQ ID NO: 241; SEQ ID NO: 243; SEQ ID NO: 244; SEQ ID NO: 255; SEQ ID NO: 256; SEQ ID NO: 261; and SEQ ID NO: 314.

[0350] The present invention also provides a prostate epithelial cell gene expression profile, which may comprise one or more nucleic acid sequences substantially homologous to a nucleic acid sequence or complementary sequence thereof selected from the group consisting of SEQ ID NO: 64; SEQ ID NO: 217; SEQ ID NO: 218; SEQ ID NO: 259; SEQ ID NO: 293; SEQ ID NO: 302; and SEQ ID NO: 320.

[0351] In yet another embodiment, a renal cortical epithelial cell gene expression profile may comprise one or more nucleic acid sequences substantially homologous to a nucleic acid sequence or complementary sequence thereof selected from the group consisting of SEQ ID NO: 49; SEQ ID NO: 57; SEQ ID NO: 104; SEQ ID NO: 123; SEQ ID NO: 160; SEQ ID NO: 165; SEQ ID NO: 166; SEQ ID NO: 219; SEQ ID NO: 267; SEQ ID NO: 270; SEQ ID NO: 279; SEQ ID NO: 280; SEQ ID NO: 283; SEQ ID NO: 291; SEQ ID NO: 305; SEQ ID NO: 307; SEQ ID NO: 310; SEQ ID NO: 313; SEQ ID NO: 325; SEQ ID NO: 326; and SEQ ID NO: 327.

[0352] The present invention further provides renal proximal tubule epithelial cell gene expression profiles comprising one or more nucleic acid sequences substantially homologous to a nucleic acid sequence or complementary sequence thereof selected from the group consisting of SEQ ID NO: 106; SEQ ID NO: 138; SEQ ID NO: 158; SEQ ID NO: 228; SEQ ID NO: 236; SEQ ID NO: 242; SEQ ID NO: 250; SEQ ID NO: 258; SEQ ID NO: 260; SEQ ID NO: 262; SEQ ID NO: 266; SEQ ID NO: 272; SEQ ID NO: 273; SEQ ID NO: 274; SEQ ID NO: 275; SEQ ID NO: 276; SEQ ID NO: 278; SEQ ID NO: 284; SEQ ID NO: 288; SEQ ID NO: 295; SEQ ID NO: 296; SEQ ID NO: 297; SEQ ID NO: 299; SEQ ID NO: 300; SEQ ID NO: 301; SEQ ID NO: 306; SEQ ID NO: 308; SEQ ID NO: 309; SEQ ID NO: 311; SEQ ID NO: 316; SEQ ID NO: 318; SEQ ID NO: 321; SEQ ID NO: 322; SEQ ID NO: 328; and SEQ ID NO: 329.

[0353] In a specific embodiment, a small airway epithelial cell gene expression profile may comprise one or more nucleic acid sequences substantially homologous to a nucleic acid sequence or complementary sequence thereof selected from the group consisting of SEQ ID NO: 173; SEQ ID NO: 174; SEQ ID NO: 183; SEQ ID NO: 220; SEQ ID NO: 221; SEQ ID NO: 222; SEQ ID NO: 229; SEQ ID NO: 230; SEQ ID NO: 231; SEQ ID NO: 232; SEQ ID NO: 233; SEQ ID NO: 234; SEQ ID NO: 235; SEQ ID NO: 237; SEQ ID NO: 238; SEQ ID NO: 240; SEQ ID NO: 245; SEQ ID NO: 246; SEQ ID NO: 247; SEQ ID NO: 248; SEQ ID NO: 249; SEQ ID NO: 251; SEQ ID NO: 252; SEQ ID NO: 254; SEQ ID NO: 257; SEQ ID NO: 263; SEQ ID NO: 264; SEQ ID NO: 265; SEQ ID NO: 268; SEQ ID NO: 269; SEQ ID NO: 270; SEQ ID NO: 277; SEQ ID NO: 281; SEQ ID NO: 282; SEQ ID NO: 286; SEQ ID NO: 287; SEQ ID NO: 290; SEQ ID NO: 294; SEQ ID NO: 298; SEQ ID NO: 303; SEQ ID NO: 312; SEQ ID NO: 315; SEQ ID NO: 317; and SEQ ID NO: 319.

[0354] The present invention also provides a renal epithelial cell gene expression profile comprising one or more nucleic acid sequences substantially homologous to a nucleic acid sequence or complementary sequence thereof selected from the group consisting of SEQ ID NO: 37; SEQ ID NO: 253; SEQ ID NO: 304; SEQ ID NO: 323; and SEQ ID NO: 324.

[0355] In a specific embodiment, the present invention provides an endothelial cell protein expression profile comprising one or more amino acid sequences encoded by all or a portion of one or more nucleic acid sequences selected from the group consisting of SEQ ID NO: 1; SEQ ID NO: 2; SEQ ID NO: 3; SEQ ID NO: 4; SEQ ID NO: 5; SEQ ID NO: 6; SEQ ID NO: 7; SEQ ID NO: 8; SEQ ID NO: 9; SEQ ID NO: 10; SEQ ID NO: 11; SEQ ID NO: 12; SEQ ID NO: 13; SEQ ID NO: 14; SEQ ID NO: 15; SEQ ID NO: 16; SEQ ID NO: 17; SEQ ID NO: 18; SEQ ID NO: 19; SEQ ID NO: 20; SEQ ID NO: 21; SEQ ID NO: 22; SEQ ID NO: 23; SEQ ID NO: 48; SEQ ID NO: 63; SEQ ID NO: 70; SEQ ID NO: 82; SEQ ID NO: 94; and SEQ ID NO: 144.

[0356] The present invention also provides a muscle cell protein expression profile comprising one or more amino acid sequences encoded by all or a portion of one or more nucleic acid sequences selected from the group consisting of SEQ ID NO: 24; SEQ ID NO: 25; SEQ ID NO: 26; SEQ ID NO: 27; SEQ ID NO: 28; SEQ ID NO: 29; SEQ ID NO: 30; SEQ ID NO: 31; SEQ ID NO: 32; SEQ ID NO: 33; SEQ ID NO: 34; SEQ ID NO: 35; SEQ ID NO: 36; SEQ ID NO: 37; SEQ ID NO: 39; SEQ ID NO: 40; SEQ ID NO: 41; SEQ ID NO: 42; SEQ ID NO: 54; SEQ ID NO: 55; and SEQ ID NO: 69.

[0357] In another embodiment, a primary cell protein expression profile may comprise one or more amino acid sequences encoded by all or a portion of one or more nucleic acid sequences selected from the group consisting of SEQ ID NO: 1; SEQ ID NO: 2; SEQ ID NO: 3; SEQ ID NO: 4; SEQ ID NO: 5; SEQ ID NO: 6; SEQ ID NO: 7; SEQ ID NO: 8; SEQ ID NO: 9; SEQ ID NO: 10; SEQ ID NO: 11; SEQ ID NO: 12; SEQ ID NO: 13; SEQ ID NO: 14; SEQ ID NO: 15; SEQ ID NO: 16; SEQ ID NO: 17; SEQ ID NO: 18; SEQ ID NO: 19; SEQ ID NO: 20; SEQ ID NO: 21; SEQ ID NO: 22; SEQ ID NO: 23; SEQ ID NO: 24; SEQ ID NO: 25; SEQ ID NO: 26; SEQ ID NO: 27; SEQ ID NO: 28; SEQ ID NO: 29; SEQ ID NO: 30; SEQ ID NO: 31; SEQ ID NO: 32; SEQ ID NO: 33; SEQ ID NO: 34; SEQ ID NO: 35; SEQ ID NO: 36; SEQ ID NO: 37; SEQ ID NO: 39; SEQ ID NO: 40; SEQ ID NO: 41; SEQ ID NO: 42; SEQ ID NO: 43; SEQ ID NO: 44; SEQ ID NO: 45; SEQ ID NO: 46; SEQ ID NO: 47; SEQ ID NO: 48; SEQ ID NO: 49; SEQ ID NO: 50; SEQ ID NO: 51; SEQ ID NO: 52; SEQ ID NO: 53; SEQ ID NO: 54; SEQ ID NO: 55; SEQ ID NO: 56; SEQ ID NO: 57; SEQ ID NO: 58; SEQ ID NO: 59; SEQ ID NO: 60; SEQ ID NO: 61; SEQ ID NO: 62; SEQ ID NO: 63; SEQ ID NO: 64; SEQ ID NO: 65; SEQ ID NO: 66; SEQ ID NO: 67; SEQ ID NO: 68; SEQ ID NO: 69; SEQ ID NO: 70; SEQ ID NO: 71; SEQ ID NO: 72; SEQ ID NO: 73; SEQ ID NO: 74; SEQ ID NO: 75; SEQ ID NO: 76; SEQ ID NO: 77; SEQ ID NO: 78; SEQ ID NO: 79; SEQ ID NO: 80; SEQ ID NO: 81; SEQ ID NO: 82; SEQ ID NO: 83; SEQ ID NO: 84; SEQ ID NO: 85; SEQ ID NO: 86; SEQ ID NO: 87; SEQ ID NO: 88; SEQ ID NO: 89; SEQ ID NO: 90; SEQ ID NO: 91; SEQ ID NO: 92; SEQ ID NO: 93; SEQ ID NO: 94; SEQ ID NO: 95; SEQ ID NO: 96; SEQ ID NO: 97; SEQ ID NO: 98; SEQ ID NO: 99; SEQ ID NO: 100; SEQ ID NO: 101; SEQ ID NO: 102; SEQ ID NO: 103; SEQ ID NO: 104; SEQ ID NO: 105; SEQ ID NO: 106; SEQ ID NO: 107; SEQ ID NO: 108; SEQ ID NO: 109; SEQ ID NO: 110; SEQ ID NO: 111; SEQ ID NO: 112; SEQ ID NO: 113; SEQ ID NO: 114; SEQ ID NO: 115; SEQ ID NO: 116; SEQ ID NO: 118; SEQ ID NO: 119; SEQ ID NO: 120; SEQ ID NO: 121; SEQ ID NO: 122; SEQ ID NO: 123; SEQ ID NO: 124; SEQ ID NO: 125; SEQ ID NO: 126; SEQ ID NO: 127; SEQ ID NO: 128; SEQ ID NO: 129; SEQ ID NO: 130; SEQ ID NO: 131; SEQ ID NO: 132; SEQ ID NO: 133; SEQ ID NO: 134; SEQ ID NO: 135; SEQ ID NO: 136; SEQ ID NO: 137; SEQ ID NO: 138; SEQ ID NO: 139; SEQ ID NO: 140; SEQ ID NO: 141; SEQ ID NO: 142; SEQ ID NO: 143; SEQ ID NO: 144; SEQ ID NO: 145; SEQ ID NO: 146; SEQ ID NO: 147; SEQ ID NO: 148; SEQ ID NO: 149; SEQ ID NO: 150; SEQ ID NO: 151; SEQ ID NO: 152; SEQ ID NO: 153; SEQ ID NO: 154; SEQ ID NO: 155; SEQ ID NO: 156; SEQ ID NO: 157; SEQ ID NO: 158; SEQ ID NO: 159; SEQ ID NO: 160; SEQ ID NO: 161; SEQ ID NO: 162; SEQ ID NO: 163; SEQ ID NO: 164; SEQ ID NO: 165; SEQ ID NO: 166; SEQ ID NO: 167; SEQ ID NO: 168; SEQ ID NO: 169; SEQ ID NO: 170; SEQ ID NO: 171; SEQ ID NO: 172; SEQ ID NO: 173; SEQ ID NO: 174; SEQ ID NO: 175; SEQ ID NO: 176; SEQ ID NO: 177; SEQ ID NO: 178; SEQ ID NO: 179; SEQ ID NO: 180; SEQ ID NO: 181; SEQ ID NO: 182; SEQ ID NO: 183; SEQ ID NO: 184; SEQ ID NO: 185; and SEQ ID NO: 186.

[0358] In yet another embodiment, an epithelial cell protein expression profile may comprise one or more amino acid sequences encoded by all or a portion of one or more nucleic acid sequences selected from the group consisting of SEQ ID NO: 47; SEQ ID NO: 60; SEQ ID NO: 67; SEQ ID NO: 73; SEQ ID NO: 75; SEQ ID NO: 76; SEQ ID NO: 77; SEQ ID NO: 78; SEQ ID NO: 80; SEQ ID NO: 96; SEQ ID NO: 98; SEQ ID NO: 99; SEQ ID NO: 111; SEQ ID NO: 112; SEQ ID NO: 123; SEQ ID NO: 127; SEQ ID NO: 131; SEQ ID NO: 150; SEQ ID NO: 153; SEQ ID NO: 154; SEQ ID NO: 155; SEQ ID NO: 156; SEQ ID NO: 157; SEQ ID NO: 158; SEQ ID NO: 159; SEQ ID NO: 160; SEQ ID NO: 161; SEQ ID NO: 162; SEQ ID NO: 163; SEQ ID NO: 164; SEQ ID NO: 165; SEQ ID NO: 166; SEQ ID NO: 167; SEQ ID NO: 168; SEQ ID NO: 169; SEQ ID NO: 170; SEQ ID NO: 171; SEQ ID NO: 172; SEQ ID NO: 173; SEQ ID NO: 174; SEQ ID NO: 175; SEQ ID NO: 176; SEQ ID NO: 177; SEQ ID NO: 178; SEQ ID NO: 179; SEQ ID NO: 180; SEQ ID NO: 181; SEQ ID NO: 182; SEQ ID NO: 183; SEQ ID NO: 184; SEQ ID NO: 185; and SEQ ID NO: 186.

[0359] The present invention further provides a keratinocyte epithelial cell protein expression profile comprising one or more amino acid sequences encoded by all or a portion of one or more nucleic acid sequences selected from the group consisting of SEQ ID NO: 187; SEQ ID NO: 188; SEQ ID NO: 189; SEQ ID NO: 190; SEQ ID NO: 191; SEQ ID NO: 192; SEQ ID NO: 193; SEQ ID NO: 194; SEQ ID NO: 195; SEQ ID NO: 196; SEQ ID NO: 197; SEQ ID NO: 198; SEQ ID NO: 199; SEQ ID NO: 200; SEQ ID NO: 201; SEQ ID NO: 202; SEQ ID NO: 203; SEQ ID NO: 204; SEQ ID NO: 205; SEQ ID NO: 206; SEQ ID NO: 207; SEQ ID NO: 208; SEQ ID NO: 209; SEQ ID NO: 210; and SEQ ID NO: 211.

[0360] In another embodiment, a mammary epithelial cell protein expression profile may comprise one or more amino acid sequences encoded by all or a portion of one or more nucleic acid sequences selected from the group consisting of SEQ ID NO: 78; SEQ ID NO: 212; SEQ ID NO: 213; SEQ ID NO: 216; SEQ ID NO: 225; SEQ ID NO: 226; SEQ ID NO: 227; SEQ ID NO: 239; SEQ ID NO: 271; SEQ ID NO: 285; and SEQ ID NO: 289.

[0361] Still further, the present invention provides a bronchial epithelial cell protein expression profile comprising one or more amino acid sequences encoded by all or a portion of one or more nucleic acid sequences selected from the group consisting of SEQ ID NO: 27; SEQ ID NO: 131; SEQ ID NO: 150; SEQ ID NO: 169; SEQ ID NO: 214; SEQ ID NO: 215; SEQ ID NO: 223; SEQ ID NO: 224; SEQ ID NO: 241; SEQ ID NO: 243; SEQ ID NO: 244; SEQ ID NO: 255; SEQ ID NO: 256; SEQ ID NO: 261; and SEQ ID NO: 314.

[0362] In yet another embodiment, a prostate epithelial cell protein expression profile comprises one or more amino acid sequences encoded by all or a portion of one or more nucleic acid sequences selected from the group consisting of SEQ ID NO: 64; SEQ ID NO: 217; SEQ ID NO: 218; SEQ ID NO: 259; SEQ ID NO: 293; SEQ ID NO: 302; and SEQ ID NO: 320.

[0363] The present invention also provides a renal cortical epithelial cell protein expression profile comprising one or more amino acid sequences encoded by all or a portion of one or more nucleic acid sequences selected from the group consisting of SEQ ID NO: 49; SEQ ID NO: 57; SEQ ID NO: 104; SEQ ID NO: 123; SEQ ID NO: 160; SEQ ID NO: 165; SEQ ID NO: 166; SEQ ID NO: 219; SEQ ID NO: 267; SEQ ID NO: 270; SEQ ID NO: 279; SEQ ID NO: 280; SEQ ID NO: 283; SEQ ID NO: 291; SEQ ID NO: 305; SEQ ID NO: 307; SEQ ID NO: 310; SEQ ID NO: 313; SEQ ID NO: 325; SEQ ID NO: 326; and SEQ ID NO: 327.

[0364] In an alternative embodiment, a renal proximal tubule epithelial cell protein expression profile may comprise one or more amino acid sequences encoded by all or a portion of one or more nucleic acid sequences selected from the group consisting of SEQ ID NO: 106; SEQ ID NO: 138; SEQ ID NO: 158; SEQ ID NO: 228; SEQ ID NO: 236; SEQ ID NO: 242; SEQ ID NO: 250; SEQ ID NO: 258; SEQ ID NO: 260; SEQ ID NO: 262; SEQ ID NO: 266; SEQ ID NO: 272; SEQ ID NO: 273; SEQ ID NO: 274; SEQ ID NO: 275; SEQ ID NO: 276; SEQ ID NO: 278; SEQ ID NO: 284; SEQ ID NO: 288; SEQ ID NO: 295; SEQ ID NO: 296; SEQ ID NO: 297; SEQ ID NO: 299; SEQ ID NO: 300; SEQ ID NO: 301; SEQ ID NO: 306; SEQ ID NO: 308; SEQ ID NO: 309; SEQ ID NO: 311; SEQ ID NO: 316; SEQ ID NO: 318; SEQ ID NO: 321; SEQ ID NO: 322; SEQ ID NO: 328; and SEQ ID NO: 329.

[0365] The present invention also provides a small airway epithelial cell protein expression profile comprising one or more amino acid sequences encoded by all or a portion of one or more nucleic acid sequences selected from the group consisting of SEQ ID NO: 173; SEQ ID NO: 174; SEQ ID NO: 183; SEQ ID NO: 220; SEQ ID NO: 221; SEQ ID NO: 222; SEQ ID NO: 229; SEQ ID NO: 230; SEQ ID NO: 231; SEQ ID NO: 232; SEQ ID NO: 233; SEQ ID NO: 234; SEQ ID NO: 235; SEQ ID NO: 237; SEQ ID NO: 238; SEQ ID NO: 240; SEQ ID NO: 245; SEQ ID NO: 246; SEQ ID NO: 247; SEQ ID NO: 248; SEQ ID NO: 249; SEQ ID NO: 251; SEQ ID NO: 252; SEQ ID NO: 254; SEQ ID NO: 257; SEQ ID NO: 263; SEQ ID NO: 264; SEQ ID NO: 265; SEQ ID NO: 268; SEQ ID NO: 269; SEQ ID NO: 270; SEQ ID NO: 277; SEQ ID NO: 281; SEQ ID NO: 282; SEQ ID NO: 286; SEQ ID NO: 287; SEQ ID NO: 290; SEQ ID NO: 294; SEQ ID NO: 298; SEQ ID NO: 303; SEQ ID NO: 312; SEQ ID NO: 315; SEQ ID NO: 317; and SEQ ID NO: 319.

[0366] In a further embodiment, a renal epithelial cell protein expression profile comprises one or more amino acid sequences encoded by all or a portion of one or more nucleic acid sequences selected from the group consisting of SEQ ID NO: 37; SEQ ID NO: 253; SEQ ID NO: 304; SEQ ID NO: 323; and SEQ ID NO: 324.

[0367] In addition, the protein expression profiles may be used to create a database and to create specific protein microarrays. Furthermore, the protein microarrays, protein expression profiles, and protein expression profile databases may be useful for epitope mapping, the study of protein-protein interaction, binding of drug candidates to a plurality of proteins, drug-drug interaction (e.g., competition binding studies of two drug candidates), binding of a plurality of drug candidates to a single or several proteins, diagnostics, or antigen mapping.

[0368] VIII. High Information Density Genes and Proteins

[0369] Although it is possible to analyze the expression of all genes expressed in a cell, a significant number of genes are expressed so infrequently and thus are of limited value in generating gene expression profiles. On the other hand, a number of genes are sufficiently expressed in a cell or differentially expressed between cells to make them useful in analyzing gene expression data. Accordingly, the present invention further provides methods for identifying the subset of genes or proteins that provides the most utility in analyzing gene and protein expression. This subset is termed “high information density genes” and “high information density proteins” and may be used to build microarrays useful for analyzing gene and protein expression and generating gene expression profiles and protein expression profiles.

[0370] Indeed, the construction of microarrays comprising nucleic acid sequences or protein-capture agents that represent high information density genes or proteins provides a means for efficiently analyzing gene or protein expression. For example, such microarrays may be universally useful for diagnosing one or many diseases. The high information density gene or protein microarrays of the present invention may comprise the least number of genes or protein-capture agents that are the most useful to researchers and healthcare providers. The microarray may include the least number of genes or protein-capture agents that produce the most specific results with the highest accuracy, specificity, and sensitivity.

[0371] More particularly, high information density genes or proteins may be identified by assessing the information content of one or more genes comprising one or more gene expression profiles or one or more proteins comprising one or more protein expression profiles. Genes or proteins providing the highest amount of information content comprise high information density genes or proteins. A high information density gene or protein provides more “information” about a particular tissue type and/or tissue state, as opposed to a gene or protein that is expressed infrequently and, therefore, is of limited value in expression analyses.

[0372] Information content may be based upon, but not limited to, the magnitude of response of a gene or protein relative to a reference state or a separate reference gene or protein. For example, the reference state may be baseline expression at a certain time point, such as prior to treatment, or may refer to a physiological state, such as being healthy or status prior to treatment. Another basis for assessing information content is the frequency of detected expression across categories of tissue, diseases, or patients compared to a reference category such as unstimulated or uninfected patients. Information content may also refer to changes in expression levels relative to categories of cells, tissues, organs, or patients.

[0373] Methods for identifying high information density genes or proteins that may be used to generate the high information density expression profiles, via the use of microarrays comprising nucleic acids or protein-capture agents representing such genes or proteins, involve algorithms that generate the high information density expression profiles. Using algorithms, genes or proteins may be ranked against each other to determine the relative information content of each gene or protein analyzed. For example, the basis for ranking genes for information content may be an algorithm adding together the number of times the gene or protein is expressed among all categories and time-points, then dividing that number by the sample set size. Furthermore, information content may be subcategorized using an algorithm that ranks the average change in expression level in all instances in which the gene or protein was expressed by the average number of times expressed.

[0374] High information density genes or proteins may be selected using an algorithm that ranks expression levels across all tissues, stimuli, and times with weighing in favor of expression that may be greatly increased or decreased among the sets. For example, high information density genes or proteins may be selected using an algorithm that correlates about 90% gene or protein expression in all cell lines or tissues with greater than about a 50% increase or decrease in expression occurring through time or after treatment with all stimuli.

[0375] High information density genes or proteins may also be selected using an algorithm that correlates a unique expression profile observed in a single cell line or tissue to a specific disease state for diagnosis or correlates to a treatment modality that may predict a positive or negative outcome. An algorithm that correlates a change in the expression profile in a single cell line or tissue to a specific disease state for diagnosis or a treatment modality that may predict a positive or negative outcome may be used as well. Further, an algorithm that correlates a change in a combination of expression profiles in a single cell line or tissue to a specific disease state for diagnosis, or a treatment modality that may predict a positive or negative outcome, may be used to select high information density genes or proteins.

[0376] High information density genes or proteins may be selected from categories that are based on patient characteristics including, for example, gender, age, disease-state, and treatment regime. Another basis for selecting high information density genes or proteins is the time of gene expression. This may include, for example, different times in a disease course, different times after stimuli exposure, different times in organismal development, or different times in the cell cycle. Another selection basis may be an increase or decrease in gene or protein expression in response to a stimulus. For example, the stimulus may include environmental alteration, viral or bacterial infection, drug exposure, protein activation, protein deactivation, chemical exposure, and cell isolation procedure.

[0377] Of the various stimuli, environmental alterations may include alterations such as changes in temperature, gas pressure, gas concentration, osmolarity, humidity, and pH. Viral stimuli may include, for example, infection with different viruses such as papilloma viruses, lentiviruses, retroviruses, hepadnaviruses, alphaviruses, flaviviruses, rhabdoviruses, herpesvirues, adenoviruses, picornaviruses, reoviruses, coronaviruses, pox viruses, paramyxoviruses, togaviruses, and arenaviruses. Bacterial stimuli may include, but may not be limited to, lipopolysacharride, formylmethionine, bacterial heat shock proteins and lipoteichoic acid.

[0378] Drug exposure stimuli may include, for example, metabolic regulators, calcium ionophores, G protein regulators, translation regulators, and transcription regulators. Protein stimuli may include proteins such as cytokines, matrix proteins, cell surface ligands, acute phase proteins, clotting factors, vasoactive proteins, and mismatched Major Histocompatibility antigens among others. Examples of chemical stimuli include organic compounds, inorganic compounds, metals, and other chemical elements. Examples of cell isolation-procedures stimuli include density gradient purification, chemical digestion, mechanical disaggregation, and centrifugation.

[0379] Once identified, the high information density genes may be used to create high information density gene microarrays. Similarly, high information density proteins may be used to create high information density protein microarays. The high information density microarrays may represent a particular tissue type, such as heart, liver, prostate, lung, nerve, muscle, or connective tissue; coronary artery endothelium, umbilical artery endothelium, umbilical vein endothelium, aortic endothelium, dermal microvascular endothelium, pulmonary artery endothelium, myometrium microvascular endothelium, keratinocyte epithelium, bronchial epithelium, mammary epithelium, prostate epithelium, renal cortical epithelium, renal proximal tubule epithelium, small airway epithelium, renal epithelium, umbilical artery smooth muscle, neonatal dermal fibroblast, pulmonary artery smooth muscle, dermal fibroblast, neural progenitor cells, skeletal muscle, astrocytes, aortic smooth muscle, mesangial cells, coronary artery smooth muscle, bronchial smooth muscle, uterine smooth muscle, lung fibroblast, osteoblasts, and prostate stromal cells.

[0380] The high information density microarrays may be used in the applications described in the present application. For example, the high information density microarrays may be used to diagnose a patient and predict treatment effectiveness. The microarray may comprise the fewest genes or protein-capture agents necessary to produce the most accurate, reproducible, and specific results that correlate to a positive outcome. Once a treatment course begins, the microarray may be used to generate a gene expression profile or a protein expression profile that correlates to a particular outcome. The clinician may then use this information to adjust or change therapy accordingly. The microarray itself may contain genes or protein-capture agents that provide the highest amount of information on at least one type but possibly all therapies, for at least one but possibly all diseases.

[0381] Used in diagnostic applications, the high-information density microarray may be compared to standard diagnostic pathologies. Specificity, sensitivity, accuracy, predictive value, and standard error of the microarray may be assessed, as well as confidence intervals and prevalence of a disease in a population using standard techniques. Such diagnostic microarrays may be validated based on at least one of the following parameters or combinations thereof described below, wherein “a” represents the number of true positives, “b” represents the number of false positives, “c” represents the number of false negatives, and “d” represents the number of true negatives.

[0382] For example, sensitivity may be defined as a/a+c×100 and indicates the percentage of individuals with the disease that have positive test results. Specificity may be defined as d/b+d and indicates the percentage of individuals who do not have the particular disease and have negative test results. Accuracy (efficiency) may be defined as a+d/a+b+c+d×100 and may be the percentage of true positive and true negative test results that are correctly identified by the test. Prevalence may be defined as a+c/a+b+c+d×100 and may be the frequency of disease in the population at a given time based on the incidence of disease per year per 100,000 people.

[0383] Positive predictive value may be defined as a/a+b×100 and may be the percentage of true positive test results based on the prevalence of disease in the population. Negative predictive value may be defined as d/c+d×100 and may be the percentage of true negative test results based on the prevalence of disease in the population.

[0384] The standard error (SE) of the diagnostic microarrays may be calculated using the following formula: SE=((p)×((1−p)/n))^{1/2}, where p=sensitivity of the test and n=sample size. The 95% confidence interval may be calculated by the formula: p−(1.96×SE) to p+(1.96×SE), where p=sensitivity of the test and “1.96” may be derived from statistical tables. The high information density microarray may have a gene or combination of genes or a protein-capture agent or a combination of protein-capture agents that yield the highest sensitivity, specificity and accuracy over the widest range of standards, and also offers the best positive and negative predictive value for the most applications.

[0385] In another embodiment, a high information-density microarray may comprise the genes or protein-capture agents that best diagnose leukemia in the most patients with the highest accuracy. Such diagnostic genes may be 100% sensitive, 100% specific and 100% accurate. A microarray may also include a combination of genes or protein-capture agents that together, rather than individually, yield high sensitivity, specificity, and accuracy, thus diagnosing leukemia with 100% sensitivity, specificity and accuracy. For example, any two separate genes or protein-capture agents may only offer 50% or less sensitivity, specificity, or accuracy for diagnosis leukemia individually, but if combined on the same microarray the specificity may reach 100% because these genes or proteins are only found together when the patient has leukemia. Hence, the gene or combination of genes or protein or combination of proteins that yield the highest information content on leukemia diagnosis may be included on the microarray.

[0386] For predicting treatment efficiency, the microarray may contain the genes or protein-capture agents that best predict treatment outcome for leukemia in patients. An expression profile specific for either positive or negative treatment outcome may be 100% sensitive, 100% specific and 100% accurate. A microarray may also include a combination of genes or protein-capture agents that together, rather than individually, predict outcomes of treatments with 100% sensitivity, specificity, and accuracy. For example, any two separate genes or protein-capture agents may only offer 50% or less sensitivity, specificity, or accuracy for outcomes of various treatment modalities for leukemia individually, but when they are combined the microarray may indicate the outcome of a specific patient treatment with sufficient, preferably 100%, accuracy. Thus, the combinations that yield the highest information content on leukemia treatment modality may be included on the microarray.

[0387] The high information-density microarrays may be used for indicating when, for example, erythropoeitin (EPO) treatment would be appropriate for a patient or for monitoring drug effectiveness during such treatment. The expression profiles used on the microarray may be one gene or protein-capture agent that may be 100% specific, 100% sensitive, and 100% accurate for indicating when EPO may be provided as a treatment or determining EPO treatment effectiveness or a combination of genes or protein-capture agents that provides the same accuracy. Accordingly, the microarray can provide valuable information on when EPO is appropriate as a course of treatment and when EPO is effective in that treatment. In like manner, a microarray may be used for indicating when cytokine treatment, such as Interleukin 5, Granulocyte Stimulating Factor, Interleukin 2, and Interleukin 12, would be appropriate for a patient during or after chemotherapy or radiation therapy, or for monitoring drug effectiveness during such treatment.

[0388] Cancer treatment is an important field in which these types of microarrays may efficiently be used to indicate when a patient has cancer, the type of cancer the patient has, as well as the best treatment modality and prognosis of the patient. The microarray may also be used to monitor drug effectiveness during cancer treatment by measuring whether cancer is present and to what extent. As an example, and without limitation, the microarray may be used for indicating when a patient has Human Immunodeficiency Virus (HIV), the best treatment modality for that patient, and the prognosis of the patient. By measuring whether HIV is present and to what extent, a microarray containing expression profiles from either the host or pathogen may be used as well to monitor drug effectiveness during HIV treatment.

[0389] The nucleic acid and protein microarrays of the present invention may be useful as a diagnostic tool in assessing the effects of treatment with a compound on relative gene and protein expression. In one embodiment of the present invention, the methods described herein may be used to assess the pharmacological effects of one or more of the following growth factors, proteins, cytokines or peptides. The genes and protein-capture agents of the present invention may be specific to such growth factors, proteins, cytokines, and peptides or relate to their expression levels.

[0390] Briefly, growth factors are hormones or cytokine proteins that bind to receptors on the cell surface, with the primary result of activating cellular proliferation and/or differentiation. Many growth factors are quite versatile, stimulating cellular division in numerous different cell types, while others are specific to a particular cell-type. The following Table 1 presents several factors, but is not intended to be comprehensive or complete, yet introduces some of the more commonly known factors and their principal activities.

TABLE 1
Growth Factors

| Factor | Principal Source | Primary Activity | Comments |
|---|---|---|---|
| Platelet Derived | Platelets, endothelial | Promotes proliferation of | Dimer required for |
| Growth Factor | cells, placenta. | connective tissue, glial and | receptor binding. |
| (PDGF) | | smooth muscle cells. PDGF | Two different protein |
| | | receptor has intrinsic tyrosine | chains, A and B, form |
| | | kinase activity. | 3 distinct dimer |
| | | | forms. |
| Epidermal | Submaxillary gland, | promotes proliferation of | EGF receptor has |
| Growth Factor | Brunners gland. | mesenchymal, glial and | tyrosine kinase |
| (EGF) | | epithelial cells | activity, activated in |
| | | | response to EGF |
| | | | binding. |
| Fibroblast | Wide range of cells; | Promotes proliferation of | Four distinct |
| Growth Factor | protein is associated with | many cells including skeletal | receptors, all with |
| (FGF) | the ECM; nineteen family | and nervous system; inhibits | tyrosine kinase |
| | members. Receptors | some stem cells; induces | activity. FGF |
| | widely distributed in | mesodermal differentiation. | implicated in mouse |
| | bone, implicated in | Non-proliferative effects | mammary tumors and |
| | several bone-related | include regulation of pituitary | Kaposi's sarcoma. |
| | diseases. | and ovarian cell function. | |
| NGF | | Promotes neurite outgrowth | Several related |
| | | and neural cell survival | proteins first |
| | | | identified as proto- |
| | | | oncogenes; trkA |
| | | | (trackA), trkB, trkC |
| Erythropoietin | Kidney | Promotes proliferation and | Also considered a |
| (Epo) | | differentiation of erythrocytes | ‘blood protein,’ and a |
| | | | colony stimulating |
| | | | factor. |
| Transforming | Common in transformed | Potent keratinocyte growth | Related to EGF. |
| Growth Factor a | cells, found in | factor. | |
| (TGF-α) | macrophages and | | |
| | keratinocytes | | |
| Transforming | Tumor cells, activated | Anti-inflammatory (suppresses | Large family of |
| Growth Factor v | TH₁ cells (T-helper) and | cytokine production and class | proteins including |
| (TGF-β) | natural killer (NK) cells | II MHC expression), | activin, inhibin and |
| | | proliferative effects on many | bone morpho-genetic |
| | | mesenchymal and epithelial | protein. Several |
| | | cell types, may inhibit | classes and |
| | | macrophage and lymphocyte | subclasses of cell- |
| | | proliferation, | surface receptors |
| Insulin-Like | Primarily liver, produced | Promotes proliferation of | Related to IGF-II and |
| Growth Factor-I | in response to GH and | many cell types, autocrine and | proinsulin, also called |
| (IGF-I) | then induces subsequent | paracrine activities in addition | Somatomedin C. |
| | cellular activities, | to the initially observed | IGF-I receptor, like |
| | particularly on bone | endocrine activities on bone. | the insulin receptor, |
| | growth | | has intrinsic tyrosine |
| | | | kinase activity. IGF-I |
| | | | can bind to the |
| | | | insulin receptor. |
| Insulin-Like | Expressed almost | Promotes proliferation of | IGF-II receptor is |
| Growth | exclusively in embryonic | many cell types primarily of | identical to the |
| Factor-II | and neonatal tissues. | fetal origin. Related to IGF-I | mannose-6-phosphate |
| (IGF-II) | | and proinsulin. | receptor that is |
| | | | responsible for the |
| | | | integration of |
| | | | lysosomal enzymes |

[0391] Additional growth factors that may be utilized within the methodologies of the present invention include insulin and proinsulin (U.S. Pat. No. 4,431,740); Activin (Vale et al., 321 NATURE 776 (1986); Ling et al., 321 NATURE 779 (1986)); Inhibin (U.S. Pat. Nos. 4,740,587; 4,737,578); and Bone Morphongenic Proteins (BMPs) (U.S. Pat. No. 5,846,931; WOZNEY, CELLULAR & MOLECULAR BIOLOGY OF BONE 131-167 (1993)).

[0392] Additional growth factors that may be utilized within the methodologies of the present invention include Activin (Vale et al., 321 NATURE 776 (1986); Ling et al., 321 NATURE 779 (1986)), Inhibin (U.S. Pat. Nos. 4,737,578; 4,740,587), and Bone Morphongenic Proteins (BMPs) (U.S. Pat. No. 5,846,931; WOZNEY, CELLULAR & MOLECULAR BIOLOGY OF BONE 131-67 (1993)).

[0393] In another embodiment, the methodologies of the present invention may be used to assess the pharmacological effects a cytokine or cytokine receptor on a patient or cell line. Secreted primarily from leukocytes, cytokines stimulate both the humoral and cellular immune responses, as well as the activation of phagocytic cells. Cytokines that are secreted from lymphocytes are termed lymphokines, whereas those secreted by monocytes or macrophages are termed monokines. A large family of cytokines are produced by various cells of the body. Many of the lymphokines are also known as interleukins (ILs), because they are not only secreted by leukocytes, but are also able to affect the cellular responses of leukocytes. More specifically, interleukins are growth factors targeted to cells of hematopoictic origin. The list of identified interleukins grows continuously. See, e.g., U.S. Pat. No. 6,174,995; U.S. Pat. No. 6,143,289; Sallusto et al., 18 ANNU. REV. IMMUNOL. 593 (2000); Kunkel et al., 59 J. LEUKOCYTE BIOL. 81 (1996).

[0394] Additional growth factor/cytokines encompassed in the methodologies of the present invention include pituitary hormones such as CEA, FSH, FSH α, FSH β, Human Chorionic Gonadotrophin (HCG), HCG α, HCG β, uFSH (urofollitropin), GH, LH, LH α, LH β, PRL, TSH, TSH α, TSH β, and CA, parathyroid hormones, follicle stimulating hormones, estrogens, progesterones, testosterones, or structural or functional analog thereof. All of these proteins and peptides are known in the art. Many may be obtained commercially from, e.g., Research Diagnostics, Inc. (Flanders, N.J.).

[0395] The cytokine family also includes tumor necrosis factors, colony stimulating factors, and interferons. See, e.g., Cosman, 7 BLOOD CELL (1996); Gruss et al., 85 BLOOD 3378 (1995); Beutler et al., 7 ANNU. REV. IMMUNOL. 625 (1989); Aggarwal et al., 260 J. BIOL. CHEM. 2345 (1985); Pennica et al., 312 NATURE 724 (1984); R & D Systems, CYTOKINE MINI-REVIEWS, at http://www.rndsystems.com.

[0396] Several cytokines are introduced, briefly, in Table 2 below.

TABLE 2
Cytokines

| Cytokine | Principal Source | Primary Activity |
|---|---|---|
| Interleukins | Primarily macrophages but also | Costimulation of APCs and T cells; |
| | neutrophils, endothelial cells, smooth | stimulates IL-2 receptor production and |
| IL1-α and β | muscle cells, glial cells, astrocytes, B- | expression of interferon-γ; may induce |
| | and T-cells, fibroblasts, and | proliferation in non-lymphoid cells. |
| | keratinocytes. | |
| IL-2 | CD4+ T-helper cells, activated TH₁ | Major interleukin responsible for clonal |
| | cells, NK cells. | T-cell proliferation. IL-2 also exerts |
| | | effects on B-cells, macrophages, and |
| | | natural killer (NK) cells. . IL-2 receptor |
| | | is not expressed on the surface of resting |
| | | T-cells, but expressed constitutively on |
| | | NK cells, that will secrete TNF-α, IFN-g |
| | | and GM-CSF in response to IL-2, which |
| | | in turn activate macrophages. |
| IL-3 | Primarily T-cells | Also known as multi-CSF, as it stimulates |
| | | stem cells to produce all forms of |
| | | hematopoietic cells. |
| IL-4 | TH₂ and mast cells | B cell proliferation, eosinophil and mast |
| | | cell growth and function, IgE and class II |
| | | MHC expression on B cells, inhibition of |
| | | monokine production |
| IL-5 | TH₂ and mast cells | eosinophil growth and function |
| IL-6 | Macrophages, fibroblasts, endothelial | IL-6 acts in synergy with IL-1 and TNF-α |
| | cells and activated T-helper cells. | in many immune responses, including T- |
| | Does not induce cytokine expression. | cell activation; primary inducer of the |
| | | acute-phase response in liver; enhances |
| | | the differentiation of B-cells and their |
| | | consequent production of |
| | | immunoglobulin; enhances |
| | | Glucocorticoid synthesis. |
| IL-7 | thymic and marrow stromal cells | T and B lymphopoiesis |
| IL-8 | Monocytes, neutrophils, macrophages, | Chemoattractant (chemokine) for |
| | and NK cells. | neutrophils, basophils and T-cells; |
| | | activates neutrophils to degranulate. |
| IL-9 | T cells | hematopoietic and thymopoietic effects |
| IL-10 | activated TH₂ cells, CD8⁺ T and B | inhibits cytokine production, promotes B |
| | cells, macrophages | cell proliferation and antibody production, |
| | | suppresses cellular immunity, mast cell |
| | | growth |
| IL-11 | stromal cells | synergisitc hematopoietic and |
| | | thrombopoietic effects |
| IL-12 | B cells, macrophages | proliferation of NK cells, INF-γ |
| | | production, promotes cell-mediated |
| | | immune functions |
| IL-13 | TH₂ cells | IL-4-like activities |
| IL-18 | macrophages/Kupffer cells, | Interferon-gamma-inducing factor with |
| | keratinocytes, glucocorticoid-secreting | potent pro-inflammatory activity |
| | adrenal cortex cells, and osteoblasts | |
| IL-21 | Activated T cells | IL21 has a role in proliferation and |
| | | maturation of natural killer (NK) cell |
| | | populations from bone marrow, in the |
| | | proliferation of mature B-cell populations |
| | | co-stimulated with anti-CD40, and in the |
| | | proliferation of T cells co-stimulated with |
| | | anti-CD3. |
| IL-23 | Activated dendritic cells | A complex of p19 and the p40 subunit of |
| | | IL-12. IL-23 binds to IL-12R beta 1 but |
| | | not IL-12R beta 2; activates Stat4 in PHA |
| | | blast T cells; induces strong proliferation |
| | | of mouse memory T cells; stimulates IFN- |
| | | gamma production and proliferation in |
| | | PHA blast T cells, as well as in CD45RO |
| | | (memory) T cells. |
| Tumor Necrosis | Primarily activated macrophages. | Once called cachectin; induces the |
| Factor | | expression of other autocrine growth |
| TNF-α | | factors, increases cellular responsiveness |
| | | to growth factors; induces signaling |
| | | pathways that lead to proliferation; |
| | | induces expression of a number of nuclear |
| | | proto-oncogenes as well as of several |
| | | interleukins. |
| (TNF-β) | T-lymphocytes, particularly cytotoxic | Also called lymphotoxin; kills a number |
| | T-lymphocytes (CTL cells); induced | of different cell types, induces terminal |
| | by IL-2 and antigen-T-Cell receptor | differentiation in others; inhibits |
| | interactions. | lipoprotein lipase present on the surface |
| | | of vascular endothelial cells. |
| Interferons | macrophages, neutrophils and some | Known as type I interferons; antiviral |
| INF-α and -β | somatic cells | effect; induction of class I MHC on all |
| | | somatic cells; activation of NK cells and |
| | | macrophages. |
| Interferon | Primarily CD8+ T-cells, activated TH₁ | Type II interferon; induces of class I |
| INF-γ | and NK cells | MHC on all somatic cells, induces class II |
| | | MHC on APCs and somatic cells, |
| | | activates macrophages, neutrophils, NK |
| | | cells, promotes cell-mediated immunity, |
| | | enhances ability of cells to present |
| | | antigens to T-cells; antiviral effects. |
| Monocyte | Peripheral blood | Attracts monocytes to sites of vascular |
| Chemoattractant | monocytes/macrophages | endothelial cell injury, implicated in |
| Protein-1 | | atherosclerosis. |
| (MCP1) | | |
| Colony | | Stimulate the proliferation of specific |
| Stimulating | | pluripotent stem cells of the bone marrow |
| Factors (CSFs) | | in adults. |
| Granulocyte- | | Specific for proliferative effects on cells |
| CSF (G-CSF) | | of the granulocyte lineage; proliferative |
| | | effects on both classes of lymphoid cells. |
| Macrophage- | | Specific for cells of the macrophage |
| CSF (M-CSF) | | lineage. |
| Granulocyte- | | Proliferative effects on cells of both the |
| MacrophageCSF | | macrophage and granulocyte lineages. |
| (GM-CSF) | | |

[0397] Other cytokines of interest that may be characterized by the invention described herein include adhesion molecules (R & D Systems, ADHESION MOLECULES I (1996), available at http://www.rndsystems.com); angiogenin (U.S. Pat. No. 4,721,672; Moener et al., 226 EUR. J. BIOCHEM. 483 (1994)); annexin V (Cookson et al., 20 GENOMICS 463 (1994); Grundmann et al., 85 PROC. NATL. ACAD. SCI. USA 3708 (1988); U.S. Pat. No. 5,767,247); caspases (U.S. Pat. No. 6,214,858; Thornberry et al., 281 SCIENCE 1312 (1998)); chemokines (U.S. Pat. Nos. 6,174,995; 6,143,289; Sallusto et al., 18 ANNU. REV. IMMUNOL. 593 (2000) Kunkel et al., 59 J. LEUKOCYTE BIOL. 81 (1996)); endothelin (U.S. Pat. Nos. 6,242,485; 5,294,569; 5,231,166); eotaxin (U.S. Pat. No. 6,271,347; Ponath et al., 97(3) J. CLIN. INVEST. 604-612 (1996)); Flt-3 (U.S. Pat. No. 6,190,655); heregulins (U.S. Pat. Nos. 6,284,535; 6,143,740; 6,136,558; 5,859,206; 5,840,525); Leptin (Leroy et al., 271(5) J. BIOL. CHEM. 2365 (1996); Maffei et al., 92 PNAS 6957 (1995); Zhang et al. (1994) NATURE 372: 425-432); Macrophage Stimulating Protein (MSP) (U.S. Pat. Nos. 6,248,560; 6,030,949; 5,315,000); Neurotrophic Factors (U.S. Pat. Nos. 6,005,081; 5,288,622); Pleiotrophin/Midkine (PTN/MK) (Pedraza et al., 117 J. BIOCHEM. 845 (1995); Tamura et al., 3 ENDOCRINE 21 (1995); U.S. Pat. No. 5,210,026; Kadomatsu et al., 151 BIOCHEM. BIOPHYS. RES. COMMUN. 1312 (1988)); STAT proteins (U.S. Pat. Nos. 6,030,808; 6,030,780; Darnell et al., 277 SCIENCE 1630-1635 (1997)); Tumor Necrosis Factor Family (Cosman, 7 BLOOD CELL (1996); Gruss et al., 85 BLOOD 3378 (1995); Beutler et al., 7 ANNU. REV. IMMUNOL. 625 (1989); Aggarwal et al., 260 J. BIOL. CHEM. 2345 (1985); Pennica et al., 312 NATURE 724 (1984)).

[0398] Also of interest regarding cytokines are proteins or chemical moieties that interact with cytokines, such as Matrix Metalloproteinases (MMPs) (U.S. Pat. No. 6,307,089; NAGASE, MATRIX METALLOPROTEINASES IN ZINC METALLOPROTEASES IN HEALTH AND DISEASE (11996)), and Nitric Oxide Synthases (NOS) (Fukuto, 34 ADV. PHARM 11(11995); U.S. Pat. No. 5,268,465).

[0399] A further embodiment of the present invention applies the methodologies described herein to the characterization of the pharmacological effects of blood proteins. The term “blood protein” is a generic term for a vast group of proteins generally circulating in blood plasma, and important for regulating coagulation and clot dissolution. See, e.g., Haematologic Technologies, Inc., HTI CATALOG, available at www.haemtech.com. Table 3 introduces, in a non-limiting fashion, some of the blood proteins contemplated by the present invention.

TABLE 3
Blood Proteins

| Protein | Principle Activity | Reference |
|---|---|---|
| Factor V | In coagulation, this glycoprotein pro- | Mann et al., 57 ANN. REV. BIOCHEM. |
| | cofactor, is converted to active cofactor, | 915 (1988); see also Nesheim et al., 254 |
| | factor Va, via the serine protease α- | J. BIOL. CHEM. 508 (1979); Tracy et al., |
| | thrombin, and less efficiently by its | 60 BLOOD 59 (1982); Nesheim et al., 80 |
| | serine protease cofactor Xa. The | METHODS ENZYMOL. 249 (1981); Jenny |
| | prothrombinase complex rapidly | et al., 84 PROC. NATL. ACAD. SCI. USA |
| | converts zymogen prothrombin to the | 4846 (1987). |
| | active serine protease, α-thrombin. | |
| | Down regulation of prothrombinase | |
| | complex occurs via inactivation of Va | |
| | by activated protein C. | |
| Factor VII | Single chain glycoprotein zymogen in | See generally, Broze et al., 80 METHODS |
| | its native form. Proteolytic activation | ENZYMOL. 228 (1981); Bajaj et al., 256 |
| | yields enzyme factor VIIa, which binds | J. BIOL. CHEM. 253 (1981); Williams et |
| | to integral membrane protein tissue | al., 264 J. BIOL. CHEM. 7536 (1989); |
| | factor, forming an enzyme complex that | Kisiel et al., 22 THROMBOSIS RES. 375 |
| | proteolytically converts factor X to Xa. | (1981); Seligsohn et al., 64 J. CLIN. |
| | Also known as extrinsic factor Xase | INVEST. 1056 (1979); Lawson et al., 268 |
| | complex. Conversion of VII to VIIa | J. BIOL. CHEM. 767 (1993). |
| | catalyzed by a number of proteases | |
| | including thrombin, factors IXa, Xa, | |
| | XIa, and XIIa. Rapid activation also | |
| | occurs when VII combines with tissue | |
| | factor in the presence of Ca, likely | |
| | initiated by a small amount of pre- | |
| | existing VIIa. Not readily inhibited by | |
| | antithrombin III/heparin alone, but is | |
| | inhibited when tissue factor added. | |
| Factor IX | Zymogen factor IX , a single chain | Thompson, 67 BLOOD, 565 (1986); |
| | vitamin K-dependent glycoprotein, | Hedner et al., HEMOSTASIS AND |
| | made in liver. Binds to negatively | THROMBOSIS 39-47 (R.W. Colman, J. |
| | charged phospholipid surfaces. | Hirsh, V.J. Marder, E.W. Salzman ed., |
| | Activated by factor XIα or the factor | 2^{nd}ed. J.P. Lippincott Co., Philadelphia) |
| | VIIa/tissue factor/phospholipid | 1987; Fujikawa et al., 45 METHODS IN |
| | complex. Cleavage at one site yields the | ENZYMOLOGY 74 (1974). |
| | intermediate IXα, subsequently | |
| | converted to fully active form IXaβ by | |
| | cleavage at another site. Factor IXaβ is | |
| | the catalytic component of the “intrinsic | |
| | factor Xase complex” (factor | |
| | VIIIa/IXa/Ca²⁺/phospholipid) that | |
| | proteolytically activates factor X to | |
| | factor Xa. | |
| Factor X | Vitamin K-dependent protein zymogen, | See Davie et al., 48 ADV. ENZYMOL 277 |
| | made in liver, circulates in plasma as a | (1979); Jackson, 49 ANN. REV. |
| | two chain molecule linked by a disulfide | BIOCHEM. 765 (1980); see also |
| | bond. Factor Xa (activated X) serves as | Fujikawa et al., 11 BIOCHEM. 4882 |
| | the enzyme component of | (1972); Discipio et al., 16 BIOCHEM. |
| | prothrombinase complex, responsible | 698 (1977); Discipio et al., 18 |
| | for rapid conversion of prothrombin to | BIOCHEM. 899 (1979); Jackson et al., 7 |
| | thrombin. | BIOCHEM. 4506 (1968); McMullen et |
| | | al., 22 BIOCHEM. 2875 (1983). |
| Factor XI | Liver-made glycoprotein homodimer | Thompson et al., 60 J. CLIN. INVEST. |
| | circulates, in a non-covalent complex | 1376 (1977); Kurachi et al., 16 |
| | with high molecular weight kininogen, | BIOCHEM. 5831 (1977); Bouma et al., |
| | as a zymogen, requiring proteolytic | 252 J. BIOL. CHEM. 6432 (1977); |
| | activation to acquire serine protease | Wuepper, 31 FED. PROC. 624 (1972); |
| | activity. Conversion of factor XI to | Saito et al., 50 BLOOD 377 (1977); |
| | factor XIa is catalyzed by factor XIIa. | Fujikawa et al., 25 BIOCHEM. 2417 |
| | XIa unique among the serine proteases, | (1986); Kurachi et al., 19 BIOCHEM. |
| | since it contains two active sites per | 1330 (1980); Scott et al., 69 J. CLIN. |
| | molecule. Works in the intrinsic | INVEST. 844 (1982). |
| | coagulation pathway by catalyzing | |
| | conversion of factor IX to factor IXa. | |
| | Complex form, factor XIa/HMWK, | |
| | activates factor XII to factor XIIa and | |
| | prekallikrein to kallikrein. Major | |
| | inhibitor of XIa is a₁-antitrypsin and | |
| | to lesser extent, antithrombin-III. | |
| | Lack of factor XI procoagulant activity | |
| | causes bleeding disorder: plasma | |
| | thromboplastin antecedent deficiency. | |
| Factor XII | Glycoprotein zymogen. Reciprocal | Schmaier et al., 18-38, and Davie, 242- |
| (Hageman | activation of XII to active serine | 267 HEMOSTASIS & THROMBOSIS |
| Factor) | protease factor XIIa by kallikrein is | (Colman et al., eds., J.B. Lippincott Co., |
| | central to start of intrinsic coagulation | Philadelphia, 1987). |
| | pathway. Surface bound α-XIIa activates | |
| | factor XI to XIa. Secondary cleavage of | |
| | α-XIIa by kallikrein yields β-XIIa, and | |
| | catalyzes solution phase activation of | |
| | kallikrein, factor VII and the classical | |
| | complement cascade. | |
| Factor XIII | Zymogenic form of glutaminyl-peptide | See McDonaugh, 340-357 HEMOSTASIS |
| | γ-glutamyl transferase factor XIIIa | & THROMBOSIS (Colman et al., eds., |
| | (fibrinoligase, plasma transglutaminase, | J.B. Lippincott Co., Philadelphia, 1987); |
| | fibrin stabilizing factor). Made in the | Folk et al., 113 METHODS ENZYMOL. |
| | liver, found extracellularly in plasma | 364 (1985); Greenberg et al., 69 BLOOD |
| | and intracellularly in platelets, | 867 (1987). Other proteins known to be |
| | megakaryocytes, monocytes, placenta, | substrates for Factor XIIIa, that may be |
| | uterus, liver and prostrate tissues. | hemostatically important, include |
| | Circulates as a tetramer of 2 pairs of | fibronectin (Iwanaga et al., 312 ANN. |
| | nonidentical subunits (A₂B₂). Full | NY ACAD. SCI. 56 (1978)), a₂- |
| | expression of activity is achieved only | antiplasmin (Sakata et al., 65 J. CLIN. |
| | after the Ca²⁺- and fibrin(ogen)- | INVEST. 290 (1980)), collagen (Mosher |
| | dependent dissociation of B subunit | et al., 64 J. CLIN. INVEST. 781 (1979)), |
| | dimer from A₂’ dimer. Last of the | factor V (Francis et al., 261 J. BIOL. |
| | zymogens to become activated in the | CHEM. 9787 (1986)), von Willebrand |
| | coagulation cascade, the only enzyme in | Factor (Mosher et al., 64 J. CLIN. |
| | this system that is not a serine protease. | INVEST. 781 (1979)) and |
| | XIIIa stabilizes the fibrin clot by | thrombospondin (Bale et al., 260 J. |
| | crosslinking the α and γ-chains of fibrin. | BIOL. CHEM. 7502 (1985); Bohn, 20 |
| | Serves in cell proliferation in wound | MOL. CELL BIOCHEM. 67 (1978)). |
| | healing, tissue remodeling, | |
| | atherosclerosis, and tumor growth. | |
| Fibrinogen | Plasma fibrinogen, a large glycoprotein, | FURLAN, Fibrinogen, IN HUMAN |
| | disulfide linked dimer made of 3 pairs of | PROTEIN DATA, (Haeberli, ed., VCH |
| | non-identical chains (Aa, Bb and g), | Publishers, N.Y., 1995); Doolittle, in |
| | made in liver. Aa has N-terminal peptide | HAEMOSTASIS & THROMBOSIS, 491-513 |
| | (fibrinopeptide A (FPA), factor XIIIa | (3rd ed., Bloom et al., eds., Churchill |
| | crosslinking sites, and 2 phosphorylation | Livingstone, 1994); HANTGAN, et al., in |
| | sites. Bb has fibrinopeptide B (FPB), 1 | HAEMOSTASIS & THROMBOSIS 269-89 |
| | of 3 N-linked carbohydrate moieties, | (2d ed., Forbes et al., eds., Churchill |
| | and an N-terminal pyroglutamic acid. | Livingstone, 1991). |
| | The g chain contains the other N-linked | |
| | glycos. site, and factor XIIIa cross- | |
| | linking sites. Two elongated subunits | |
| | ((AaBbg)₂) align in an antiparallel way | |
| | forming a trinodular arrangement of the | |
| | 6 chains. Nodes formed by disulfide | |
| | rings between the 3 parallel chains. | |
| | Central node (n-disulfide knot, E | |
| | domain) formed by N-termini of all 6 | |
| | chains held together by 11 disulfide | |
| | bonds, contains the 2 IIa-sensitive sites. | |
| | Release of FPA by cleavage generates | |
| | Fbn I, exposing a polymerization site on | |
| | Aa chain. These sites bind to regions on | |
| | the D domain of Fbn to form proto- | |
| | fibrils. Subsequent IIa cleavage of FPB | |
| | from the Bb chain exposes additional | |
| | polymerization sites, promoting lateral | |
| | growth of Fbn network. Each of the 2 | |
| | domains between the central node and | |
| | the C-terminal nodes (domains D and E) | |
| | has parallel a-helical regions of the Aa, | |
| | Bb and g chains having protease- | |
| | (plasmin-) sensitive sites. Another major | |
| | plasmin sensitive site is in hydrophilic | |
| | preturbance of a-chain from C-terminal | |
| | node. Controlled plasmin degradation | |
| | converts Fbg into fragments D and E. | |
| Fibronectin | High molecular weight, adhesive, | Skorstengaard et al., 161 Eur. J. |
| | glycoprotein found in plasma and | BIOCHEM. 441 (1986); Kornblihtt et al., |
| | extracellular matrix in slightly different | 4 EMBO J. 1755 (1985); Odermatt et |
| | forms. Two peptide chains | al., 82 PNAS 6571 (1985); Hynes, R.O., |
| | interconnected by 2 disulfide bonds, has | ANN. REV. CELL BIOL., 1, 67 (1985); |
| | 3 different types of repeating | Mosher 35 ANN. REV. MED. 561 (1984); |
| | homologous sequence units. Mediates | Rouslahti et al., 44 Cell 517 (1986); |
| | cell attachment by interacting with cell | Hynes 48 CELL 549 (1987); Mosher 250 |
| | surface receptors and extracellular | BIOL. CHEM. 6614 (1975). |
| | matrix components. Contains an Arg- | |
| | Gly-Asp-Ser (RGDS) cell attachment- | |
| | promoting sequence, recognized by | |
| | specific cell receptors, such as those on | |
| | platelets. Fibrin-fibronectin complexes | |
| | stabilized by factor XIIIa-catalyzed | |
| | covalent cross-linking of fibronectin to | |
| | the fibrin a chain. | |
| β₂- | Also called β₂I and Apolipoprotein H. | See, e.g., Lozier et al., 81 PNAS 2640- |
| Glycoprotein I | Highly glycosylated single chain protein | 44 (1984); Kato & Enjyoi 30 BIOCHEM. |
| | made in liver. Five repeating mutually | 11687-94 (1997); Wurm, 16 INT'L J. |
| | homologous domains consisting of | BIOCHEM. 511-15 (1984); Bendixen et |
| | approximately 60 amino acids disulfide | al., 31 BIOCHEM. 3611-17 (1992); |
| | bonded to form Short Consensus | Steinkasserer et al., 277 BIOCHEM. J. |
| | Repeats (SCR) or Sushi domains. | 387-91 (1991); Nimpf et al., 884 |
| | Associated with lipoproteins, binds | BIOCHEM. BIOPHYS. ACTA 142-49 |
| | anionic surfaces like anionic vesicles, | (1986); Kroll et. al. 434 BIOCHEM. |
| | platelets, DNA, mitochondria, and | BIOPHYS. Acta 490-501 (1986); Polz et |
| | heparin. Binding can inhibit contact | al., 11 INT'L J. BIOCHEM. 265-73 |
| | activation pathway in blood coagulation. | (1976); McNeil et al., 87 PNAS 4120-24 |
| | Binding to activated platelets inhibits | (1990); Galli et a;. 1 LANCET 1544-47 |
| | platelet associated prothrombinase and | (1990); Matsuuna et al., II LANCET 177- |
| | adenylate cyclase activities. Complexes | 78 (1990); Pengo et al., 73 THROMBOSIS |
| | between b₂I and cardiolipin have been | & HAEMOSTASIS 29-34 (1995). |
| | implicated in the anti-phospholipid | |
| | related immune disorders LAC and SLE. | |
| Osteonectin | Acidic, noncollagenous glycoprotein | Villarreal et al., 28 BIOCHEM. 6483 |
| | (Mr = 29,000) originally isolated from | (1989); Tracy et al., 29 INT'L J. |
| | fetal and adult bovine bone matrix . May | BIOCHEM. 653 (1988); Romberg et al., |
| | regulate bone metabolism by binding | 25 BIOCHEM. 1176 (1986); Sage & |
| | hydroxyapatite to collagen. Identical to | Bornstein 266 J. BIOL. CHEM. 14831 |
| | human placental SPARC. An alpha | (1991); Kelm & Mann 4 J. BONE MIN. |
| | granule component of human platelets | RES. 5245 (1989); Kelm et al., 80 |
| | secreted during activation. A small | BLOOD 3112 (1992). |
| | portion of secreted osteonectin | |
| | expressed on the platelet cell surface in | |
| | an activation-dependent manner | |
| Plasminogen | Single chain glycoprotein zymogen with | See Robbins, 45 METHODS IN |
| | 24 disulfide bridges, no free sulfhydryls, | ENZYMOLOGY 257 (1976); COLLEN, |
| | and 5 regions of internal sequence | 243-258 BLOOD COAG. (Zwaal et al., |
| | homology, “kringles”, each five triple- | eds., New York, Elsevier, 1986); see |
| | looped, three disulfide bridged, and | also Castellino et al., 80 METHODS IN |
| | homologous to kringle domains in t-PA, | ENZYMOLOGY 365 (1981); Wohl et al., |
| | u-PA and prothrombin. Interaction of | 27 THROMB. RES. 523 (1982); Barlow et |
| | plasminogen with fibrin and α2- | al., 23 BIOCHEM. 2384 (1984); |
| | antiplasmin is mediated by lysine | SOTTRUP-JENSEN ET AL., 3 PROGRESS IN |
| | binding sites. Conversion of | CHEM. FIBRINOLYSIS & THROMBOLYSIS |
| | plasminogen to plasmin occurs by | 197-228 (Davidson et al., eds., Raven |
| | variety of mechanisms, including | Press, New York 1975). |
| | urinary type and tissue type | |
| | plasminogen activators, streptokinase, | |
| | staphylokinase, kallikrein, factors IXa | |
| | and XIIa, but all result in hydrolysis at | |
| | Arg560-Val561, yielding two chains | |
| | that remain covalently associated by a | |
| | disulfide bond. | |
| tissue | t-PA, a serine endopeptidase synthesized | See Plasminogen. |
| Plasminogen | by endothelial cells, is the major | |
| Activator | physiologic activator of plasminogen in | |
| | clots, catalyzing conversion of | |
| | plasminogen to plasmin by hydrolising a | |
| | specific arginine-alanine bond. Requires | |
| | fibrin for this activity, unlike the kidney- | |
| | produced version, urokinase-PA. | |
| Plasmin | See Plasminogen. Plasmin, a serine | See Plasminogen. |
| | protease, cleaves fibrin, and activates | |
| | and/or degrades compounds of | |
| | coagulation, kinin generation, and | |
| | complement systems. Inhibited by a | |
| | number of plasma protease inhibitors in | |
| | vitro. Regulation of plasmin in vivo | |
| | occurs mainly through interaction with | |
| | a₂-antiplasmin, and to a lesser extent, a₂- | |
| | macroglobulin. | |
| Platelet Factor-4 | Low molecular weight, heparin-binding | Rucinski et al., 53 BLOOD 47 (1979); |
| | protein secreted from agonist-activated | Kaplan et al., 53 BLOOD 604 (1979); |
| | platelets as a homotetramer in complex | George 76 BLOOD 859 (1990); Busch et |
| | with a high molecular weight, | al., 19 THROMB. RES. 129 (1980); Rao |
| | proteoglycan, carrier protein. Lysine- | et al., 61 BLOOD 1208 (1983); Brindley, |
| | rich, COOH-terminal region interacts | et al., 72 J. CLIN. INVEST. 1218 (1983); |
| | with cell surface expressed heparin-like | Deuel et al., 74 PNAS 2256 (1981); |
| | glycosaminoglycans on endothelial | Osterman et al., 107 BIOCHEM. |
| | cells, PF-4 neutralizes anticoagulant | BIOPHYS. RES. COMMUN. 130 (1982); |
| | activity of heparin exerts procoagulant | Capitanio et al., 839 BIOGHEM. |
| | effect, and stimulates release of | BIOPHYS. ACTA 161 (1985). |
| | histamine from basophils. Chemotactic | |
| | activity toward neutrophils and | |
| | monocytes. Binding sites on the platelet | |
| | surface have been identified and may be | |
| | important for platelet aggregation. | |
| Protein C | Vitamin K-dependent zymogen, protein | See Esmon, 10 PROGRESS IN THROMB. |
| | C, made in liver as a single chain | & HEMOSTS. 25 (1984); Stenflo, 10 |
| | polypeptide then converted to a disulfide | SEMIN. IN THROMB. & HEMOSTAS. 109 |
| | linked heterodimer. Cleaving the heavy | (1984); Griffen et al., 60 BLOOD 261 |
| | chain of human protein C converts the | (1982); Kisiel et al., 80 METHODS |
| | zymogen into the serine protease, | ENZYMOL. 320 (1981); Discipio et al., |
| | activated protein C. Cleavage catalyzed | 18 BIOCHEM. 899 (1979). |
| | by a complex of α-thrombin and | |
| | thrombomodulin. Unlike other vitamin | |
| | K dependent coagulation factors, | |
| | activated protein C is an anticoagulant | |
| | that catalyzes the proteolytic | |
| | inactivation of factors Va and VIIIa, and | |
| | contributes to the fibrinolytic response | |
| | by complex formation with plasminogen | |
| | activator inhibitors. | |
| Protein S | Single chain vitamin K-dependent | Walker, 10 SEMIN. THROMB. |
| | protein functions in coagulation and | HEMOSTAS. 131 (1984); Dahlback et al., |
| | complement cascades. Does not | 10 SEMIN. THROMB. HEMOSTAS., 139 |
| | possess the catalytic triad. Complexes | (1984); Walker 261 J. BIOL. CHEM. |
| | to C4b binding protein (C4BP) and to | 10941 (1986). |
| | negatively charged phospholipids, | |
| | concentratin C4BP at cell surfaces | |
| | following injury. Unbound S serves as | |
| | anticoagulant cofactor protein with | |
| | activated Protein C. A single cleavage | |
| | by thrombin abolishes protein S cofactor | |
| | activity by removing gla domain. | |
| Protein Z | Vitamin K-dependent, single-chain | Sejima et al., 171 BIOCHEM. |
| | protein made in the liver. Direct | BIOPHYSICS RES. COMM. 661 (1990); |
| | requirement for the binding of thrombin | Hogg et al., 266 J. BIOL. CHEM. 10953 |
| | to endothelial phospholipids. Domain | (1991); Hogg et al., 17 BIOCHEM. |
| | structure similar to that of other vitamin | BIOPHYSICS RES. COMM. 801 (1991); |
| | K-dependant zymogens like factors VII, | Han et al., 38 BIOCHEM. 11073 (1999); |
| | IX, X, and protein C. N-terminal region | Kemkes-Matthes et al., 79 THROMB. |
| | contains carboxyglutamic acid domain | RES. 49 (1995). |
| | enabling phospholipid membrane | |
| | binding. C-terminal region lacks | |
| | “typical” serine protease activation site. | |
| | Cofactor for inhibition of coagulation | |
| | factor Xa by serpin called protein Z- | |
| | dependant protease inhibitor. Patients | |
| | diagnosed with protein Z deficiency | |
| | have abnormal bleeding diathesis during | |
| | and after surgical events. | |
| Prothrombin | Vitamin K-dependent, single-chain | Mann et al., 45 METHODS IN |
| | protein made in the liver. Binds to | ENZYMOLOGY 156 (1976); Magnusson |
| | negatively charged phospholipid | et al., PROTEASES IN BIOLOGICAL |
| | membranes. Contains two “kringle” | CONTROL 123-149 (Reich et al., eds. |
| | structures. Mature protein circulates in | Cold Spring Harbor Labs., New York |
| | plasma as a zymogen and, during | 1975); Discipio et al., 18 BIOCHEM. 899 |
| | coagulation, is proteolytically activated | (1979). |
| | to the potent serine protease α-thrombin. | |
| α-Thrombin | See Prothrombin. During coagulation, | 45 METHODS ENZYMOL. 156 (1976). |
| | thrombin cleaves fibrinogen to form | |
| | fibrin, the terminal proteolytic step in | |
| | coagulation, forming the fibrin clot. | |
| | Thrombin also responsible for feedback | |
| | activation of procofactors V and VIII. | |
| | Activates factor XIII and platelets, | |
| | functions as vasoconstrictor protein. | |
| | Procoagulant activity arrested by | |
| | heparin cofactor II or the antithrombin | |
| | III/heparin complex, or complex | |
| | formation with thrombomodulin. | |
| | Formation of thrombin/thrombomodulin | |
| | complex results in inability of thrombin | |
| | to cleave fibrinogen and activate factors | |
| | V and VIII, but increases the efficiency | |
| | of thrombin for activation of the | |
| | anticoagulant, protein C. | |
| β-Thrombo- | Low molecular weight, heparin-binding, | See, e.g., George 76 BLOOD 859 (1990); |
| globulin | platelet-derived tetramer protein, | Holt & Niewiarowski 632 BIOCHIM. |
| | consisting of four identical peptide | BIOPHYS. ACTA 284 (1980); |
| | chains. Lower affinity for heparin than | Niewiarowski et al., 55 BLOOD 453 |
| | PF-4. Chemotactic activity for human | (1980); Varma et al., 701 BIOCHIM. |
| | fibroblasts, other functions unknown. | BIOPHYS. AGTA 7 (1982); Senior et al., |
| | | 96 J. CELL. BIOL. 382 (1983). |
| Thrombopoietin | Human TPO (Thrombopoietin, Mpl- | Horikawa et al., 90 (10) BLOOD 4031-38 |
| | ligand, MGDF) stimulates the | (1997); de Sauvage et al., 369 NATURE |
| | proliferation and maturation of | 533-58 (1995). |
| | megakaryocytes and promotes increased | |
| | circulating levels of platelets in vivo. | |
| | Binds to c-Mpl receptor. | |
| Thrombo- | High-molecular weight, heparin-binding | Dawes et al., 29 THROMB. RES. 569 |
| spondin | glycoprotein constituent of platelets, | (1983); Switalska et al., 106 J. LAB. |
| | consisting of three, identical, disulfide- | CLIN. MED. 690 (1985); Lawler et al. |
| | linked polypeptide chains. Binds to | 260 J. BIOL. CHEM. 3762 (1985); Wolff |
| | surface of resting and activated platelets, | et al., 261 J. BIOL. CHEM. 6840 (1986); |
| | may effect platelet adherence and | Asch et al., 79 J. CLIN. CHEM. 1054 |
| | aggregation. An integral component of | (1987); Jaffe et al., 295 NATURE 246 |
| | basement membrane in different tissues. | (1982); Wright et al., 33 J. HISTOCHEM. |
| | Interacts with a variety of extracellular | CYTOCHEM. 295 (1985); Dixit et al., |
| | macromolecules including heparin, | 259 J. BIOL. CHEM. 10100 (1984); |
| | collagen, fibrinogen and fibronectin, | Mumby et al., 98 J. CELL. BIOL. 646 |
| | plasminogen, plasminogen activator, | (1984); Lahav et al, 145 EUR. J. |
| | and osteonectin. May modulate cell- | BIOCHEM. 151 (1984); Silverstein et al, |
| | matrix interactions. | 260 J. BIOL. CHEM. 10346 (1985); |
| | | Clezardin et al. 175 EUR. J. BIOCHEM. |
| | | 275 (1988); Sage & Bornstein (1991). |
| Von Willebrand | Multimeric plasma glycoprotein made of | Hoyer 58 BLOOD 1 (1981); Ruggeri & |
| Factor | identical subunits held together by | Zimmerman 65 J. CLIN. INVEST. 1318 |
| | disulfide bonds. During normal | (1980); Hoyer & Shainoff 55 BLOOD |
| | hemostasis, larger multimers of vWF | 1056 (1980); Meyer et al., 95 J. LAB. |
| | cause platelet plug formation by forming | CLIN. INVEST. 590 (1980); Santoro 21 |
| | a bridge between platelet glycoprotein | THROMB. RES. 689 (1981); Santoro, & |
| | IB and exposed collagen in the | Cowan 2 COLLAGEN RELAT. RES. 31 |
| | subendothelium. Also binds and | (1982); Morton et al., 32 THROMB. RES. |
| | transports factor VIII (antihemophilic | 545 (1983); Tuddenham et al., 52 BRIT. |
| | factor) in plasma. | J. HAEMATOL. 259 (1982). |

[0400] Additional blood proteins contemplated herein include the following human serum proteins, which may also be placed in another category of protein (such as hormone or antigen): Actin, Actinin, Amyloid Serum P, Apolipoprotein E, B2-Microglobulin, C-Reactive Protein (CRP), Cholesterylester transfer protein (CETP), Complement C3B, Ceruplasmin, Creatine Kinase, Cystatin, Cytokeratin 8, Cytokeratin 14, Cytokeratin 18, Cytokeratin 19, Cytokeratin 20, Desmin, Desmocollin 3, FAS (CD95), Fatty Acid Binding Protein, Ferritin, Filamin, Glial Filament Acidic Protein, Glycogen Phosphorylase Isoenzyme BB (GPBB), Haptoglobulin, Human Myoglobin, Myelin Basic Protein, Neurofilament, Placental Lactogen, Human SHBG, Human Thyroid Peroxidase, Receptor Associated Protein, Human Cardiac Troponin C, Human Cardiac Troponin I, Human Cardiac Troponin T, Human Skeletal Troponin I, Human Skeletal Troponin T, Vimentin, Vinculin, Transferrin Receptor, Prealbumin, Albumin, Alpha-1-Acid Glycoprotein, Alpha-1-Antichymotrypsin, Alpha-1-Antitrypsin, Alpha-Fetoprotein, Alpha-1-Microglobulin, Beta-2-microglobulin, C-Reactive Protein, Haptoglobulin, Myoglobulin, Prealbumin, PSA, Prostatic Acid Phosphatase, Retinol Binding Protein, Thyroglobulin, Thyroid Microsomal Antigen, Thyroxine Binding Globulin, Transferrin, Troponin I, Troponin T, Prostatic Acid Phosphatase, Retinol Binding Globulin (RBP). All of these proteins, and sources thereof, are known in the art. Many of these proteins are available commercially from, for example, Research Diagnostics, Inc. (Flanders, N.J.).

[0401] Another embodiment applies the methodologies of the present invention to the analysis of the effects of a neurotransmitter or the receptor of a neurotransmitter on a patient or cell sample. Neurotransmitters are chemicals, some of them proteinaceous, made by neurons and used by them to transmit signals to the other neurons or non-neuronal cells (e.g., skeletal muscle, myocardium, pineal glandular cells) that they innervate. Neurotransmitters produce their effects by being released into synapses when their neuron of origin fires (i.e., becomes depolarized) and then attaching to receptors in the membrane of the post-synaptic cells. This causes changes in the fluxes of particular ions across that membrane, making cells more likely to become depolarized, if the neurotransmitter happens to be excitatory, or less likely if it is inhibitory. Neurotransmitters can also produce their effects by modulating the production of other signal-transducing molecules (“second messengers”) in the post-synaptic cells. See generally COOPER, BLOOM & ROTH, THE BIOCHEM. BASIS OF NEUROPHARMACOLOGY (7th Ed. Oxford Univ. Press, NYC, 1996); http://web.indstate.edu/thcme/mwking/nerves. Neurotransmitters contemplated in the present invention include, but are not limited to, Acetylcholine, Serotonin, γ-aminobutyrate (GABA), Glutamate, Aspartate, Glycine, Histamine, Epinephrine, Norepinephrine, Dopamine, Adenosine, ATP, Nitric oxide, and any of the peptide neurotransmitters such as those derived from pre-opiomelanocortin (POMC), as well as antagonists and agonists of any of the foregoing.

[0402] Table 4 presents a non-limiting list and description of some pharmacologically active peptides which may be incorporated into the methods contemplated by the present invention.

TABLE 4
Pharmacologically active peptides

| Binding partner/ | | |
|---|---|---|
| Protein of interest | | |
| (form of peptide) | Pharmacological activity | Reference |
| EPO receptor | EPO mimetic | Wrighton et al., 273 SCIENcE 458-63 |
| (intrapeptide | | (1996); U.S. Pat. No. 5,773,569, issued |
| disulfide-bonded) | | Jun. 30, 1998. |
| EPO receptor | EPO mimetic | Livnah et al., 273 SCIENCE 464-71 |
| (C-terminally cross- | | (1996); Wrighton et al., 15 NATURE |
| linked dimer) | | BIOTECHNOLOGY 1261-5 (1997); Int'l |
| | | Patent Application WO 96/40772, |
| | | published Dec. 19, 1996. |
| EPO receptor | EPO mimetic | Naranda et al., 96 PNAS 7569-74 (1999). |
| (linear) | | |
| c-Mpl | TPO-mimetic | Cwirla et al., 276 SCIENCE 1696-9 (1997); |
| (linear) | | U.S. Pat. No. 5,869,451, issued Feb. |
| | | 9, 1999; U.S. Pat. No. 5,932,946, issued |
| | | Aug. 3, 1999. |
| c-Mpl | TPO-mimetic | Cwirla et al., 276 SCIENCE 1696-9 (1997). |
| (C-terminally cross- | | |
| linked dimer) | | |
| (disulfide-linked | stimulation of | Paukovits et al., 364 HOPPE-SEYLERS Z. |
| dimer) | hematopoesis | PHYSIOL. CHEM. 30311 (1984); |
| | (“G-CSF-mimetic”) | Laerurngal., 16 EXP. HEMAT. 274-80 |
| | | (1988). |
| (alkylene-linked dimer) | G-CSF-mimetic | Batnagar et al., 39 J. MED. CHEM. 38149 |
| | | (1996); Cuthbertson et al., 40 J. MED. |
| | | CHEM. 2876-82 (1997); King et al., 19 |
| | | EXP. HEMATOL. 481 (1991); King et al., |
| | | 86 (Suppl. 1) BLOOD 309 (1995). |
| IL-I receptor | inflammatory and | U.S. Pat. No. 5,608,035; U.S. Pat. No. |
| (linear) | autoimmune diseases (“IL-1 | 5,786,331; U.S Pat. No. 5,880,096; |
| | antagonist” or “IL-1 ra- | Yanofsky et al., 93 PNAS 7381-6 (1996); |
| | mimetic”) | Akeson et al., 271 J. BIOL. CHEM. 30517- |
| | | 23 (1996); Wiekzorek et al., 49 POL. J. |
| | | PHARMACOL. 107-17 (1997); Yanofsky, |
| | | 93 PNAS 7381-7386 (1996). |
| Facteur thyrnique | stimulation of lymphocytes | Inagaki-Ohara et al., 171 CELLULAR |
| (linear) | (FTS-mimetic) | IMMUNOL. 30-40 (1996); Yoshida, 6 J. |
| | | IMMUNOPHARMACOL 141-6 (1984). |
| CTLA4 MAb | CTLA4-mimetic | Fukumoto et al., 16 NATURE BIOTECH. |
| (intrapeptide di-sulfide | | 267-70 (1998). |
| bonded) | | |
| TNF-α receptor | TNF-α antagonist | Takasaki et al., 15 NATURE BIOTECH. |
| (exo-cyclic) | | 1266-70 (1997); WO 98/53842, published |
| | | Dec. 3, 1998. |
| TNF-α receptor | TNF-α antagonist | Chirinos-Rojas, J. IMM., 5621-26. |
| (linear) | | |
| C3b | inhibition of complement | Sahu et al., 157 IMMUNOL. 884-91 (1996); |
| (intrapeptide di-sulfide | activation; autoimmune | Morikis et al., 7 PROTEIN SCI. 619-27 |
| bonded) | diseases (C3b antagonist) | (1998). |
| vinculin | cell adhesion processes, cell | Adey et al., 324 BIOCH EM. J. 523-8 |
| (linear) | growth, differentiation | (1997). |
| | wound healing, tumor | |
| | metastasis (“vinculin | |
| | binding”) | |
| C4 binding protein (C413P) | anti-thrombotic | Linse et al. 272 BIOL. CHEM. 14658-65 |
| (linear) | | (1997). |
| urokinase receptor | processes associated with | Goodson et al., 91 PNAS 7129-33 (1994); |
| (linear) | urokinase interaction with its | International patent application WO |
| | receptor (e.g. angiogenesis, | 97/35969, published Oct. 2, 1997. |
| | tumor cell invasion and | |
| | metastasis; (URK antagonist) | |
| Mdm2, Hdm2 | Inhibition of inactivation of | Picksley et al., 9 ONCOGENE 2523-9 |
| (linear) | p53 mediated by Mdm2 or | (1994); Bottger et al. 269 J. MOL. BIOL. |
| | hdm2; anti-tumor | 744-56 (1997); Bottger et al., 13 |
| | (“Mdm/hdm antagonist”) | ONCOGENE 13: 2141-7 (1996). |
| p21^{WAF1} | anti-tumor by mimicking the | Ball et al., 7 CURR. BIOL. 71-80 (1997). |
| (linear) | activity of p21^{WAF1} | |
| farnesyl transferase | anti-cancer by preventing | Gibbs et al., 77 CELL 175-178 (1994). |
| (linear) | activation of ras oncogene | |
| Ras effector domain | anti-cancer by inhibiting | Moodie et at., 10 TRENDS GENEL 44-48 |
| (linear) | biological function of the ras | (1994); Rodriguez et al., 370 NATURE |
| | oncogene | 527-532 (1994). |
| SH2/SH3 domains | anti-cancer by inhibiting | Pawson et al, 3 CURR. BIOL. 434-432 |
| (linear) | tumor growth with activated | (1993); Yu et al., 76 CELL 933-945 |
| | tyrosine kinases | (1994). |
| p16^{INK4} | anti-cancer by mimicking | Fahraeus et al., 6 CURR. BIOL. 84-91 |
| (linear) | activity of p16; e.g., | (1996). |
| | inhibiting cyclin D-Cdk | |
| | complex (“p, 16-mimetic”) | |
| Src, Lyn | inhibition of Mast cell | Stauffer et al., 36 BIOCHEM. 9388-94 |
| (linear) | activation, IgE-related | (1997). |
| | conditions, type I | |
| | hypersensitivity (“Mast cell | |
| | antagonist”). | |
| Mast cell protease | treatment of inflammatory | International patent application WO |
| (linear) | disorders mediated by | 98/338 12, published Aug. 6, 1998. |
| | release of tryptase-6 (“Mast | |
| | cell protease inhibitors”) | |
| SH3 domains | treatment of SH3-mediated | Rickles et al., 13 EMBO J. 5598- |
| (linear) | disease states (“SH3 | 5604 (1994); Sparks et al., 269 J. |
| | antagonist”) | BIOL. CHEM. 238536 (1994); |
| | | Sparks et al., 93 PNAS 1540-44 |
| | | (1996). |
| HBV core antigen (HBcAg) | treatment of HBV viral | Dyson & Muray, PNAS 2194-98 |
| (linear) | antigen (HBcAg) infections | (1995). |
| | (“anti-HBV”) | |
| selectins | neutrophil adhesion | Martens et al., 270 J. BIOL. |
| (linear) | inflammatory diseases | CHEM. 21129-36 (1995); |
| | (“selectin antagonist”) | European Pat. App. EP 0 714 |
| | | 912, published Jun. 5, 1996. |
| calmodulin | calmodulin | Pierce et al., 1 MOLEC. |
| (linear, cyclized) | antagonist | DIVEMILY 25965 (1995); |
| | | Dedman et al., 267 J. BIOL. |
| | | CHEM. 23025-30 (1993); Adey |
| | | & Kay, 169 GENE 133-34 |
| | | (1996). |
| integrins | tumor-homing; treatment for | International patent applications WO |
| (linear, cyclized) | conditions related to | 95/14714, published Jun. 1, 1995; WO |
| | integrin-mediated cellular | 97/08203, published Mar. 6, 1997; WO |
| | events, including platelet | 98/10795, published Mar. 19, 1998; WO |
| | aggregation, thrombosis, | 99/24462, published May 20, 1999; Kraft |
| | wound healing, osteoporosis, | et al., 274 J. BIOL. CHEM. 1979-85 (1999) |
| | tissue repair, angiogenesis | |
| | (e.g., for treatment of cancer) | |
| | and tumor invasion | |
| | (“integrin-binding”) | |
| fibronectin and extracellular | treatment of inflammatory | International patent application WO |
| matrix components of T-cells | and autoimmune conditions | 98/09985, published Mar. 12, 1998. |
| and macrophages | | |
| (cyclic, linear) | | |
| somatostatin and cortistatin | treatment or prevention of | European patent application EP 0 911 |
| (linear) | hormone-producing tumors, | 393, published Apr. 28, 1999. |
| | acromegaly, giantism, | |
| | dementia, gastric ulcer, | |
| | tumor growth, inhibition of | |
| | hormone secretion, | |
| | modulation of sleep or | |
| | neural activity | |
| bacterial lipopoly-saccharide | antibiotic; septic shock; | U.S. Pat. No. 5,877,151, issued Mar. 2, |
| (linear) | disorders modulatable by | 1999. |
| | CAP3 7 | |
| parelaxin, mellitin | antipathogenic | International patent application WO |
| (linear or cyclic) | | 97/31019, published 28 Aug. 1997. |
| VIP | impotence, neuro- | International patent application WO |
| (linear, cyclic) | degenerative disorders | 97/40070, published Oct. 30, 1997. |
| CTLs | cancer | European patent application EP 0 770 |
| (linear) | | 624, published May 2, 1997. |
| THF-gamma2 | | Burnstein, 27 BIOCHEM. 4066-71 (1988). |
| (linear) | | |
| Amylin | | Cooper, 84 PNAS 8628-32 (1987). |
| (linear) | | |
| Adreno-medullin | | Kitamura, 192 BBRC 553-60 (1993). |
| (linear) | | |
| VEGF | anti-angiogenic; cancer, | Fairbrother, 37 BIOCHEM. 17754-64 |
| (cyclic, linear) | rheumatoid arthritis, diabetic | (1998). |
| | retinopathy, psoriasis | |
| | (“VEGF antagonist′”) | |
| MMP | inflammation and | Koivunen, 17 NATURE BIOTECH. 768-74 |
| (cyclic) | autoimmune disorders; | (1999). |
| | tumor growth (“MMP | |
| | inhibitor”) | |
| HGH fragment | | U.S. Pat. No. 5,869,452, issued |
| (linear) | | Feb. 9, 1999. |
| Echistatin | inhibition of platelet | Gan, 263 J. BIOL. 19827-32 (1988). |
| | aggregation | |
| SLE autoantibody | SLE | International patent application WO |
| (linear) | | 96/30057, published Oct. 3, 1996. |
| GD1 alpha | suppression of tumor | Ishikawa Ct al., 1 FEBS LETT. 20-4 |
| | metastasis | (1998). |
| anti-phospholipid β-2 | endothelial cell activation, | Blank Mal., 96 PNAS 5164-8 (1999). |
| glycoprotein-1 (β2GPI) | anti-phospholipid syndrome | |
| | (APS), thromboembolic | |
| antibodies | phenomena, | |
| | thrombocytopenia, and | |
| | recurrent fetal loss | |
| T-CeII Receptor β chain | diabetes | International patent application WO |
| (linear) | | 96/101214, published Apr. 18, 1996. |

[0403] IX. Database Creation, Database Access, and Business Methods

[0404] The business methods of the present application relate to the commercial and other uses of the methodologies of the present invention. In one aspect, the business methods include the marketing, sale, or licensing of the present methodologies in the context of providing consumers, i.e., patients, medical practitioners, medical service providers, and pharmaceutical distributors and manufacturers, with the gene expression profiles, high information density gene expression profiles, and/or protein expression profiles provided by the present invention.

[0405] Furthermore, the present invention also relates to business methods in which gene expression profiles, high information density gene expression profiles, and/or protein expression profiles are used for analyzing test samples (e.g., patient samples). In a specific embodiment, this method may be accomplished using the gene expression profile microarrays of the present invention. For example, a user (e.g., a health practitioner such as a physician) may obtain a sample (e.g., blood, tissue biopsy) from a patient. The sample may be prepared in-house, for example, using hospital facilities or the sample may be sent to a commercial laboratory facility. Briefly, RNA is extracted from the patient sample using methods that are well-known in the art. See e.g., SAMBROOK ET AL. (1989). The RNA is, for example, then amplified by PCR, labeled with a fluorophore, and hybridized to a support representing a particular gene expression profile. The support is scanned for fluorescence and the results of the scan may be sent to a central gene expression profile database for analysis. In another embodiment, the sample itself is sent to a central laboratory facility for scanning analysis. The scanning results may be sent to the central laboratory facility for analysis via a computer terminal and through the Internet or other means. The connection between the user and the computer system is preferably secure.

[0406] In practice, the user may input, for example, information relating to the fluorescence scanning results of the support as well as additional information concerning the patient such as the patient's disease state, clinical chemistry (e.g., red blood cell count, electrolytes), and other factors relating to the patient's disease state. The central computer system may then, through the use of resident computer programs, provide an analysis of the patient's sample and generate a gene expression profile reflecting the patient's genetic profile.

[0407] Those skilled in the art will appreciate that the methods and apparatus of the present invention apply to any computer system, regardless of whether the computer system is a complicated multi-user computing apparatus or a single user device such as a personal computer or workstation. A computer system suitably comprises a processor, main memory, a memory controller, an auxiliary storage interface, and a terminal interface, all of which are interconnected. Note that various modifications, additions, substitutions, or deletions may be made to the computer system within the scope of the present invention such as the addition of cache memory or other peripheral devices.

[0408] The processor performs computation and control functions of the computer system, and comprises a suitable central processing unit (CPU). The processor may comprise a single integrated circuit, such as a microprocessor, or may comprise any suitable number of integrated circuit devices and/or circuit boards working in cooperation to accomplish the functions of a processor. The processor suitably executes the algorithms (e.g., MaxCor, Mean Log Ratio) of the present invention within its main memory.

[0409] The main memory of the computer systems of the present invention suitably contains one or more computer programs relating to the algorithms used to generate the gene expression profiles and an operating system. The term “computer program” is used in its broadest sense, and includes any and all forms of computer programs, including source code, intermediate code, machine code, and any other representation of a computer program. The term “memory,” as used herein, refers to any storage location in the virtual memory space of the system. It should be understood that portions of the computer program and operating system may be loaded into an instruction cache for the main processor to execute, while other files may well be stored on magnetic or optical disk storage devices. In addition, it is to be understood that the main memory may comprise disparate memory locations.

[0410] The computer systems of the present invention may also comprise a memory controller, through use of a separate processor, which is responsible for moving requested information from the main memory and/or through the auxiliary storage interface to the main processor. While for the purposes of explanation, the memory controller is described as a separate entity, those skilled in the art understand that, in practice, portions of the function provided by the memory controller may actually reside in the circuitry associated with the main processor, main memory, and/or the auxiliary storage interface.

[0411] In a preferred embodiment, the auxiliary storage interface allows the computer system to store and retrieve information from auxiliary storage devices, such as magnetic disks (e.g., hard disks or floppy diskettes) or optical storage devices (e.g., CD-ROM). One suitable storage device is a direct access storage device (DASD). A DASD may be a floppy disk drive, which may read programs and data from a floppy disk. It is important to note that while the present invention has been (and will continue to be) described in the context of a fully functional computer system, those skilled in the art will appreciate that the mechanisms of the present invention are capable of being distributed as a program product in a variety of forms, and that the present invention applies equally regardless of the particular type of signal bearing media to actually carry out the distribution. Examples of signal bearing media include: recordable type media such as floppy disks and CD ROMS, and transmission type media such as digital and analog communication links, including wireless communication links.

[0412] Furthermore, the computer systems of the present invention may comprise a terminal interface that allows system administrators and computer programmers to communicate with the computer system, normally through programmable workstations. It should be understood that the present invention applies equally to computer systems having multiple processors and multiple system buses. Similarly, although the system bus of the preferred embodiment is a typical hardwired, multidrop bus, any connection means that supports bidirectional communication in a computer-related environment could be used.

[0413] The gene expression profile database, high information density gene expression profile database, and/or protein expression profiles may be an internal database designed to include annotation information about the expression profiles generated by the methods of the present invention and through other sources and methods. Such information may include, for example, the databases in which a given nucleic acid or protein amino acid sequence was found, patient information associated with the expression profile, including age, cancer or tumor type or progression, descriptive information about related cDNA associated with the sequence, tissue or cell source, sequence data obtained from external sources, treatment information, diagnostic and prognostic information, information regarding gene expression and/or protein expression in response to various stimuli, expression profiles for a given gene, high information density gene, and/or protein and the related disease state or course of disease, for example whether the expression profile relates to or signifies a cancerous or pre-cancerous state, and preparation methods. The expression profiles may be based on protein and/or nucleic acid microarray data obtained from publicly available or proprietary sources. The database may be divided into two sections: one for storing the sequences and related expression profiles and the other for storing the associated information. This database may be maintained as a private database with a firewall within the central computer facility. However, this invention is not so limited and the expression profile databases may be made available to the public.

[0414] The database may be a network system connecting the network server with clients. The network may be any one of a number of conventional network systems, including a local area network (LAN) or a wide area network (WAN), as is known in the art (e.g., Ethernet). The server may include software to access database information for processing user requests, and to provide an interface for serving information to client machines. The server may support the World Wide Web and maintain a website and Web browser for client use. Client/server environments, database servers, and networks are well documented in the technical, trade, and patent literature.

[0415] Through a Web browser, clients may construct search requests for retrieving data from a microarray database, a gene expression database, and/or protein expression database. For example, the user may “point and click” to user interface elements such as buttons, pull down menus, and scroll bars. The client requests may be transmitted to a Web application which formats them to produce a query that may be used to gather information from the system database, based, for example, on microarray or expression data obtained by the client, and/or other phenotypic or genotypic information. For example, the client may submit expression data based on microarray expression profiles obtained from a patient and use the system of the present invention to obtain a diagnosis based on a comparison by the system of the client expression data with the expression data contained in the database. By way of example, the system compares the expression profiles submitted by the client with expression profiles contained in the database and then provides the client with diagnostic information based on the best match of the client expression profiles with the database profiles. In addition, the website may provide hypertext links to public databases such as GenBank and associated databases maintained by the National Center for Biotechnology Information (NCBI), part of the National Library of Medicine as well as any links providing relevant information for gene expression analysis, protein expression analysis, genetic disorders, scientific literature, and the like. Information including, but not limited to, identifiers, identifier types, biomolecular sequences, common cluster identifiers (GenBank, Unigene, Incyte template identifiers, and so forth) and species names associated with each gene, is contemplated.

[0416] The present invention also provides a system for accessing bioinformation, including gene expression profiles, high information density gene expression profiles, protein expression profiles, and annotative information, which is useful in the context of the methods of the present invention. The present invention contemplates, in one embodiment, the use of a Graphical User Interface (“GUI”) for the access of gene expression profile information stored in a database. In a preferred embodiment, the GUI may be composed of two frames. A first frame may contain a selectable list of databases accessible by the user. When a database is selected in the first frame, a second frame may display information resulting from the pair-wise comparison of the expression profile database with the client-supplied expression profile as described above, along with any other phenotypic or genotypic information.

[0417] The second frame of the GUI may contain a listing of biomolecular sequence expression information and profiles contained in the selected database. Furthermore, the second frame may allow the user to select a subset, including all of the biomolecular sequences, and to perform an operation on the list of biomolecular sequences. In a preferred embodiment, the user may select the subset of biomolecular sequences by selecting a selection box associated with each biomolecular sequence. In a preferred embodiment, the operations that may be performed include, but are not limited to, downloading all listed biomolecular sequences to a database spreadsheet with classification information, saving the selected subset of biomolecular sequences to a user file, downloading all listed biomolecular sequences to a database spreadsheet without classification information, and displaying classification information on a selected subset of biomolecular sequences.

[0418] If the user chooses to display classification information on a selected subset of biomolecular sequences, a second GUI may be presented to the user. In one embodiment, the second GUI may contain a listing of one or more external databases used to create the high information density gene expression profile databases as described above. Furthermore, for each external database, the GUI may display a list of one or more fields associated with each external database. In another embodiment, the GUI may allow the user to select or deselect each of the one or more fields displayed in the second GUI. In yet another embodiment, the GUI may allow the user to select or deselect each of the one or more external databases.

[0419] In another embodiment, the business methods of the present invention include establishing a distribution system for distributing diagnostic of the present invention for sale, and may optionally include establishing a sales group for marketing the diagnostics. Yet another aspect of the present invention provides a method of conducting a target discovery business comprising identifying, by one or more of the above drug discovery methods, a test compound, as described above, which modulates the level of expression of a gene, a high information density gene, the activity of the gene product, or the activity of the high information density gene product; and optionally conducting therapeutic profiling of compounds identified, or further analogs thereof, for efficacy and toxicity in animals; and optionally licensing or selling, the rights for further drug development of said identified compounds.

[0420] Another embodiment of the present invention comprises a variety of business methods including methods for screening drug and toxicity effects on tissue or cell samples. A further aspect of the present invention comprises business methods for providing gene expression profiles, high information density gene expression profiles, and/or protein expression profiles for normal and diseased tissues. Also within the scope of this invention are business methods providing diagnostics and predictors for patient samples.

[0421] A further aspect of the present invention comprises business methods for the manufacturing and use of gene microarrays, high information density gene microarrays, and protein microarrays. The business methods further relate to providing information generated by using gene microarrays, gene expression profiles, high information density genes, high information density gene microarrays, high information density gene expression profiles, protein microarrays and protein expression microarrays.

[0422] The present invention also provides a business method for determining whether a patient has a disease or disorder associated with the overexpression and/or upregulation of a gene, or a pre-disposition to such a disease or disorder. This method comprises the steps of receiving information related to a gene or protein (e.g., sequence information and/or information related thereto), receiving phenotypic and/or genotypic information associated with the patient, and acquiring information from the databases of the present invention related to the gene or protein and/or related to such a gene- or protein-associated disease or disorder, such as cancer and specifically colon cancer. Based on one or more of the phenotypic and/or genotypic information, the gene or protein information, and the acquired information, this method may further comprise the step of determining whether the subject has a disease or disorder associated with a gene or protein, and specifically a gene or protein of the present invention, or a pre-disposition to such a gene-or protein-associated disease or disorder. The method may also comprise the step of recommending a particular treatment for the disease, disorder or pre-disease condition. Similarly, the present invention contemplates business methods as described above using, for example, high information density genes or proteins.

[0423] In one embodiment, the present invention contemplates a business method for determining whether a patient has a cellular proliferation, growth, differentiation, and/or migration disorder or a pre-disposition to a cellular proliferation, growth, differentiation, and/or migration disorder and specifically a cancerous or pre-cancerous state. This method comprises the steps of receiving information related to, e.g., sequence information of a gene or protein of the present invention and/or information related thereto, receiving phenotypic information associated with the patient, acquiring information from the network related to, e.g., sequence information of a gene or proteinand/or information related thereto, and/or related to a cellular proliferation, growth, differentiation, and/or migration disorder and specifically a cancerous or pre-cancerous state. Based on one or more of the phenotypic and/or genotypic information, the sequence information and/or information related thereto, and the acquired information this method may further comprise the step of determining whether the patient has a cellular proliferation, growth, differentiation, and/or migration disorder or a pre-disposition to a cellular proliferation, growth, differentiation, and/or migration disorder and specifically a cancerous or pre-cancerous state. The method may also comprise the step of recommending a particular treatment for the disease, disorder or pre-disease condition. Similarly, the present invention contemplates business methods as described above using, for example, high information density genes or proteins.

[0424] Without further elaboration, it is believed that one skilled in the art, using the preceding description, can utilize the present invention to the fullest extent. The following examples are illustrative only, and not limiting of the remainder of the disclosure in any way whatsoever.

### EXAMPLES

### Example 1

### Cell-Specific Gene Expression Analysis

[0425] By integrating laser capture microdissection, RNA amplification, and cDNA microarray technology, diverse cell types obtained in situ may be successfully screened and subsequently identified by differential gene expression. To demonstrate this integration of technologies, the differential gene expressions of large and small-sized neurons in the dorsal root ganglia (DRG) were examined. In general, large DRG are myelinated, fast-conducting neurons that transmit mechanosensory information, and small DRG neurons are unmyelinated, slow-conducting, and transmit nociceptive information.

[0426] As shown in FIG. 1, large (diameter>40 μm) and small (diameter<25 μm) neurons were cleanly and individually captured via LCM from 10 μm sections of Nissl-stained rat DRGs. For this study, two sets of 1000 large neurons and 3 sets of 1000 small neurons were captured for cDNA microarray analysis.

[0427] RNA was extracted from each set of neurons and linearly amplified an estimated 106-fold via T7 RNA polymerase. Once amplified, three fluorescently labeled probes were synthesized from an individually amplified RNA (aRNA) and hybridized in triplicate to a microarray (or “chip”) containing 477 cDNAs and 30 cDNAs encoding plant genes (for determination of non-specific nucleic acid hybridization). Expression in each neuronal set (designated as S1, S2, and S3 for small DRG neurons and L1 and L2 for large DRG neurons) was monitored in triplicate, requiring a total of 15 microarrays. The quality of the microarray data is demonstrated in FIG. 2a, which shows pseudocolor arrays, one resulting from hybridization to probes derived from neuronal set SI and the other from neuronal set L2. The enlarged section of the chip displays some differences in fluorescence intensity (i.e., expression levels) for particular cDNAs and demonstrates that regions containing different cDNAs are relatively uniform in size and that the background between these regions is relatively low.

[0428] To determine whether a signal corresponding to a particular cDNA is reproducible between different chips, for each neuronal set, the coefficient of variation (CV) was calculated. From these values, the overall average CV for all 477 cDNAs per neuronal set was calculated to be: S1=15.81%, S2=16.93%, S3=17.75%, L1=20.17%, and L2=19.55%.

[0429] Independent amplifications (˜10⁶-fold) of different sets of the same neuronal subtype yielded quite similar expression patterns. For example, the correlation of signal intensities between S1 vs. S2 was R²=0.9688, and between S1 vs. S3 was R²=0.9399 (FIG. 2b). Similar results were obtained between the two sets of large neurons: R²=0.929 for L1 vs. L2 (FIG. 2b). Conversely, a comparison between all three small neuronal sets (S1, S2, and S3) versus the two large sets (L1 and L2) yielded a much lower correlation (R²=0.6789), demonstrating as expected that a subgroup of genes are differentially expressed in each of the two neuronal subtypes (FIG. 2b).

[0430] To identify the mRNAs that are differentially expressed in large and small DRG neurons, the 477 cDNAs were examined and those with 1.5-fold or greater differences (at P<0.05) were sequenced. Twenty-seven mRNAs appeared to be preferentially expressed in small DRG neurons and 14 mRNAs were preferentially expressed in large DRG (FIG. 3 and FIG. 4). To confirm the observed differential gene expression, in situ hybridization was performed with a subgroup of these cDNAs.

[0431] For the small neurons, five mRNAs were examined that encoded the following: fatty acid binding protein, sodium voltage-gated channel (NaN), phospholipase C delta-4, CGRP, and annexin V. For the large DRG neurons, three mRNAs were examined: neurofilament NF-L, neurofilament NF-H, and the beta-1 subunit of voltage-gated sodium channels. Based on quantitative measurements comparing the overall intensity of signal in small and large neurons and the percentage of cells labeled within the total population of either small or large neurons, the preferential expression of these mRNAs was demonstrated in large and small DRG neurons (FIG. 5 and FIG. 6).

[0432] Although this study identified preferentially expressed mRNAs within large and small DRG neurons, there is a great deal more heterogeneity within DRG neurons beyond simply small and large. For example, small DRG neurons are unmyelinated, slow-conducting, and transmit nociceptive information; whereas large DRG are myelinated, fast-conducting neurons that transmit mechanosensory information. These structural and functional differences would presumably be reflected in a heterogeneous gene expression. To address this more complicated genetic heterogeneity, immunocytochemistry may be coupled with LCM followed by RNA amplification and cDNA chip analysis as a means to further differentiate cell types within large and small DRG. In addition, chips containing a larger number of cDNAs (i.e., >10,000) can be constructed to more accurately identify the differential gene expression between large and small neurons.

[0433] The results shown herein demonstrate that expression profiles generated via these methods may not only be useful for screening cDNAs, but also, more importantly, to produce databases that contain cell type specific gene expression profile. Cell type specificity within a database will give an investigator much greater leverage in understanding the contributions of individual cell types to a particular normal or disease state and thus allow for a much finer hypotheses to be subsequently generated. Furthermore, genes, which are coordinately expressed within a given cell type, can be identified as the database grows to contain numerous gene expression profiles from a variety of cell types (or neuronal subtypes). Coordinate gene expression may also suggest functional coupling between the encoded proteins and therefore aid in determining the function for the vast majority of cDNAs currently cloned.

[0434] Laser Capture Microdissection (LCM). Two adult female Sprague Dawley rats were used in this study. Animals were anesthetized with Metofane (Methoxyflurane, Cat#556850, Mallinckrodt Veterinary Inc. Mundelein, Ill.) and sacrificed by decapitation. Using RNase-free conditions, cervical dorsal root ganglia (DRGs) were quickly dissected, placed in cryomolds, covered with frozen-tissue embedding medium OCT (Tissue-Tek, GBI, Inc., Clearwater, Minn.), and frozen in dry ice-cold 2-methylbutane (˜−60° C.). The DRGs were then sectioned at 7-10 μm in a cryostat, mounted on plain (non-coated) clean microscope slides, and immediately frozen on a block of dry ice. The sections were stored at −70° C. until further use.

[0435] A quick Nissl (cresyl violet acetate) staining was employed in order to identify the DRG neurons. Slides containing DRG sections were loaded onto a slide holder, immediately fixed in 100% ethanol for 1 minute followed by rehydration via subsequent immersions (5 seconds each) in 95%, 70%, and 50% ethanol diluted in RNase-free deionized water. Next, the slides were stained with 0.5% Nissl/0.1 M sodium acetate buffer for 1 minute, dehydrated in graded ethanol (5 seconds each), and cleared in xylene (1 minute). Once air-dried, the slides were ready for LCM.

[0436] The PixCell II LCM™ System from Acturus Engineering Inc. (Mountain View, Calif.) was used for laser-capture. Following manufacture's protocols, 2 sets of large and 3 sets small DRG neurons (1000 cells per set) were laser-captured. The criteria for large and small DRG neurons are as follows: a DRG neuron was classified as small if it had a diameter<25 μm plus an identifiable nucleus whereas a DRG neuron with a diameter>40 μm plus an identifiable nucleus was classified as large.

[0437] RNA extraction of LCM samples. Total RNA was extracted from the LCM samples with Micro RNA Isolation Kit (Stratagene, San Diego, Calif.) with some modifications. Briefly, after incubating the LCM samples in 200 μl denaturing buffer and 1.6 μl β-Mercaptoethanol at room temperature for 5 minutes, the LCM samples were extracted with 20 μl of 2 M sodium acetate, 220 μl phenol, and 40 μl chloroform:isoamyl alcohol. The aqueous layer was collected, mixed with 1 μl of 10 mg/ml carrier glycogen, and then precipitated with 200 μl of isopropanol. Following a 70% ethanol wash and air-dry, the pellets were resuspended in 16 μl of RNase-free water, 2 μl 10×DNase I reaction buffer, 1 μl Rnasin, and 1 μl of DNase I, then incubated at 37° C. for 30 minutes to remove any genomic DNA contamination. The phenol-chloroform extraction was repeated. The pellet was resuspend in 11 μl of RNase-free water and used for RT-PCR and RNA amplification.

[0438] Reverse transcription (RT) of RNA. First stand synthesis was completed by adding 10 μl of RNA isolated from the LCM samples and 1 μl of 0.5 mg/ml T7-oligo dT primer (5′TCTAGTCGACGGCCAGTGAATTGTAATACGACTCACTATAGGGCGT₂₁-3′). The primer/RNA mix was incubated for 10 minutes at 70° C., followed by a 5-minute incubation at 42° C. Next, 4 μl 5× first strand reaction buffer, 2 μl 0.1 M DTT, 1 μl 10 mM dNTPs, 1 μl RNasin, and 1 μl Superscript II (Invitrogen, Carlsbad, Calif.) were added to the mix and incubated at 42° C. for one hour. Following this incubation, 30 μl second strand synthesis buffer, 3 μl 10 mM dNTPs, 4 μl DNA Polymerase I, 1 μl E. coli RNase H, 1 μl E. coli DNA ligase, and 92 μl RNase-free water were added and samples were incubated at 16° C. for 2 hours. T4 DNA Polymerase (2 μl) was then added to each sample and samples were incubated for 10 minutes at 16° C. The cDNA was then extracted by the phenol-chloroform method and washed 3× with 500 μl water in a Microcon-100 column (Millipore Corp., Bedford, Mass.). After collection from the column, the cDNA was dried to a final volume of 8 μl for in vitro transcription.

[0439] RNA amplification. The Ampliscribe T7 Transcription Kit (Epicentre Technologies) was used to amplify RNA. In a microfuge tube, 8 μl double-stranded cDNA; 2 μl of 10× Ampliscribe T7 buffer; 1.5 μl of each 100 mM ATP, CTP, GTP, and UTP; 2 μl 0.1 M DTT; and 2 μl T7 RNA Polymerase was added and then incubated at 42° C. for 3 hours. The amplified RNA (aRNA) was washed 3× in a Microcon-100 column, collected, and dried to a final volume of 10 μl.

[0440] Amplified RNA (10 μl) from the first round amplification was mixed with 1 μl random hexamers (1 mg/ml, Pharmacia Corp., Piscataway, N.J.), incubated for 10 minutes at 70° C., chilled on ice, and then equilibrated at room temperature for 10 minutes. For the initial reaction, 4 μl 5× first stand buffer, 2 μl 0.1 M DTT, 1 μl 10 mM dNTPs, 1 μl RNasin, and 1 μl Superscript RT II were added to the aRNA mix, and then incubated at room temperature for 5 minutes followed by a 1-hour incubation at 37° C. Following the 1-hour incubation, 1 μl RNase H was added and the sample was incubated at 37° C. for 20 minutes. For second strand cDNA synthesis, 1 μl T7-oligo dT primer (0.5 mg/ml) was added to the aRNA reaction mix and the sample was incubated at 70° C. for 5 minutes, then for 10 minutes at 42° C. Following this incubation, 30 μl second strand synthesis buffer, 3 μl 10 mM dNTPs, 4 μl DNA Polymerse I, 1 μl E. coli RNase H, 1 μl E. coli DNA ligase, and 90 μl of RNase-free water were added to the sample mix and the sample was then incubated at 37° C. for 2 hours. T4 DNA Polymerase (2 μl) was then added and the sample was incubated for 10 minutes at 16° C. The double-stranded cDNA was extracted with 150 μl phenol/chloroform to remove extraneous protein and purified with Microcon-100 column to remove the unincorporated nucleotides and salts. The cDNA can be used for T7 in vitro transcription and aRNA amplification.

[0441] In situ Hybridization. Briefly, cDNAs were subcloned into pBluescript II SK (Stratagene). The cDNA vectors were then linearized and radiolabeled by ³⁵S-UTP incorporation via in vitro transcription with T7 or T3 RNA polymerase. The probes were then purified with Quick Spin™ Columns (Boehringer Mannheim, Indianapolis, Ind.). The radiolabeled probes (10⁷ cpm/probe) were hybridized to rat DRG sections (10 μm, 4% paraformaldehyde-fixed) which were mounted on Superfrost Plus slides (VWR). Following an overnight hybridization at 58° C., the slides were exposed to film. Subsequently, the slides were coated with Kodak liquid emulsion NTB2 and exposed in light-proof boxes for 1-2 weeks at 4° C. The slides were developed in Kodak Developer D-19, fixed in Kodak Fixer, and Nissl stained for expression analysis.

[0442] Under light field microscopy, mRNA expression levels of specific cDNAs were semi-quantitatively analyzed. This was accomplished as follows: no expression (−, grains were <5-fold of the background); weak expression (±, grains were 5- to 10-fold of the background); low expression (+, grains were 10- to 20-fold of the background); moderated expression (++, grains were 20- to 30-fold of the background); and strong expression (+++, grains were >30-fold of the background) (FIG. 6). The percentage of small or large neurons expressing a specific mRNA was obtained by counting the number of labeled (above background) and unlabeled cells from four sections (at least 200 cells were counted).

[0443] Microarray design. The 477 cDNA clones, obtained from two separate differential display experiments, were printed on silylated slides. The print spots were about 125 μm in diameter and were spaced 300 μm apart from center to center. Plant genes were also printed on the slides to serve as a control for non-specific hybridization.

[0444] Microarray probe synthesis. Cy3-labeled cDNA probes were synthesized from aRNA isolated from LCM DRGs with Superscript Choice System for cDNA Synthesis (Invitrogen Corp., Carlsbad, Calif.). In brief, 5 μg aRNA and 3 μg random hexamers were mixed in a total volume of 26 μl (containing RNase-free water), heated to 70° C. for 10 minutes, and then chilled on ice. For the labeling reaction, 10 μl first strand buffer, 5 μl 0.1 M DTT, 1.5 μl Rnasin, 1 μl 25 mM d(GAT)TP, 2 μl 1 mM dCTP, 2 μl Cy3-dCTP, and 2.5 μl Superscript RT II were added to the aRNA mix and incubated at room temperature for 10 minutes, and then for 2 hours at 37° C. To degrade the aRNA template, 6 μl 3N NaOH was added and the sample was incubated at 65° C. for 30 minutes. Following this incubation, 20 μl 1M Tris-HCl (pH 7.4), 12 μl 1N HCl, and 12 μl water were added. The probes were purified with Microcon 30 Columns (Millipore Corp., Bedford, Mass.) and Qiagen Nucleotide Removal Columns (Qiagen Corp., Valencia, Calif.). The probes were vacuum-dried and resuspended in 20 μl of hybridization buffer (5×SSC, 0.2% SDS) containing mouse Cot1 DNA.

[0445] Microarray hybridization. Printed glass slides were treated with sodium borohydrate solution (0.066 M NaBH4, 0.06 M NaCl) to ensure amino-linkage of cDNAs to the slides. Then, the slides were boiled in water for 2 minutes to denature the cDNA. Cy3-labeled probes were heated to 99° C. for 5 minutes, cooled to room temperature for 5 minutes, and then applied to the slides. The slides were covered with glass cover slips, sealed with DPX (Fluka) and hybridized at 60° C. for 4-6 hours. At the end of hybridization, the slides were cooled to room temperature. The slides were first washed in 1×SSC and 0.2% SDS at 55° C. for 5 minutes, and then washed in 0.1×SSC and 0.2% SDS for 5 minutes at 55° C. After a quick rinse in 0.1×SSC and 0.2% SDS, the slides were air dried and ready for scanning.

[0446] Microarray quantitation. The cDNA microarrays were scanned for Cy3 fluorescence using the ScanArray 3000 (General Scanning, Inc., Watertown, Mass.). ImaGene Software (Biodiscovery, Inc., Marina Del Ray, Calif.) was then subsequently used for quantitation. Briefly, the intensity of each spot (i.e., cDNA) was corrected by subtracting the immediate surrounding background. Next, the corrected intensities were normalized for each cDNA with the following formula:

$$\frac{intensity ( background corrected )}{{75}^{th} \text{-} percentile value of the intensity of the entire chip} \times 1000$$

[0447] To determine “non-specific” nucleic acid hybridization, 75^{th}-percentile values were calculated from the individual averages of each plant cDNA (for a total of 30 different cDNAs). The overall 75-percentile value for S1, S2, and S3 was 48.68, and for L1 and L2 was 40.94.

[0448] Statistical analyses. To assess the correlation of intensity value for each cDNA between individual sets of neurons (i.e., S1 vs. S2) or between two neuronal subtypes (i.e., small DRG vs. large DRG), scatter plots were used and the linear relationships were measured. The coefficient of determination (R²) was calculated and indicated the variability of intensity values in one group vs. the other.

[0449] To statistically determine whether the intensity values measured from microarray quantitation were true signals, each intensity was compared, via a one-sample t-test, to the 75^{th}-percentile value of the 30 plant cDNAs that were present on each chip (representing nonspecific nucleic acid hybridization). Values not significantly different from the 75-percentile value are presented in FIG. 3 and FIG. 4 and so noted. To determine which cDNAs are statistically significant in their differential gene expression between large and small neurons, the intensity for each cDNA from neuronal sets for large neurons (L1 and L2) and small neurons (S1, S2, and S3) were grouped together and intensity values were averaged for each corresponding cDNA. A two-sample t-test for one-tailed hypotheses was used to detect a gene expression difference between small neurons and large neurons.

### Example 2

### Algorithms to Produce Gene or Protein Expression Profiles

[0450] Each cell or tumor type in any given state or age has a unique gene expression pattern that distinguishes it from other tissues or cells. Using profile extraction algorithms, the gene expression profiles from many different cell types may be extracted to create a profile database. Thus, in the broadest sense, unknown samples can then be identified by comparing its profile against such a database.

[0451] To create such a database, tissue or cell samples may be divided into classifying groups (i.e., tumor vs. normal; endothelial vs. muscle, etc.). This can be done either manually or if the groups are unknown, by using a clustering algorithm such as k-means. The gene expression data is transformed into a log-ratio value, and the genes with weak differential values are filtered from the data. The gene expression profiles are then extracted using the MaxCor or Mean Log Ratio algorithms of the present invention.

[0452] For an unknown sample, it may be necessary to transform the gene expression data of the sample prior to scoring against the expression profiles. The type of data transformation may depend on the profile extraction algorithm used (i.e., MaxCor or Mean Log Ratio). The sample expression data is then scored against the profile database. A high score indicates that the unknown sample contains or is related to the sample from which the profile was derived. However, the most accurate scoring function will depend on the profile extraction algorithm used to extract the gene expression data.

[0453] Preparation of data for profile extraction. First, a reference gene expression vector is constructed where A, B, . . . Z denote the groups of samples (e.g., tumor tissue or smooth muscle cell) that will be differentiated and a, b, . . . z denote the number of samples within each group, respectively. As an example, the notation A₂₁ represents the expression intensity from the 2nd gene in sample 1 of group A. If each sample was hybridized to a DNA chip with size n genes, then the following matrices represent expression data from all of the groups A, B, . . . Z, respectively.

$$[ \begin{matrix}{A}_{11} & {A}_{12} & ⋯ & {A}_{1 a} \\ {A}_{21} & {A}_{22} & ⋯ & {A}_{2 a} \\ ⋮ & ⋯ & ⋰ & ⋮ \\ {A}_{n1} & {A}_{n2} & ⋯ & {A}_{n a}\end{matrix} ] [ \begin{matrix}{B}_{11} & {B}_{12} & ⋯ & {B}_{1 b} \\ {B}_{21} & {B}_{22} & ⋯ & {B}_{2 b} \\ ⋮ & ⋯ & ⋰ & ⋮ \\ {B}_{n1} & {B}_{n2} & ⋯ & {B}_{n b}\end{matrix} ] ⋯ [ \begin{matrix}{Z}_{11} & {Z}_{12} & ⋯ & {Z}_{1 z} \\ {Z}_{21} & {Z}_{22} & ⋯ & {Z}_{2 z} \\ ⋮ & ⋯ & ⋰ & ⋮ \\ {Z}_{n1} & {Z}_{n2} & ⋯ & {Z}_{n z}\end{matrix} ]$$

[0454] The geometric mean expression value is calculated for each gene in each matrix. Thus, A_{1(geomean)} is the geometric mean of set (A₁₁ A₁₂ . . . A₁ₐ) where A₁ denotes gene 1 in group A.

$$[ \begin{matrix}{A}_{1 ( geomean )} \\ {A}_{2 ( geomean )} \\ ⋮ \\ {A}_{n ( geomean )}\end{matrix} ] [ \begin{matrix}{B}_{1 ( geomean )} \\ {B}_{2 ( geomean )} \\ ⋮ \\ {B}_{n ( geomean )}\end{matrix} ] ⋯ [ \begin{matrix}{Z}_{1 ( geomean )} \\ {Z}_{2 ( geomean )} \\ ⋮ \\ {Z}_{n ( geomean )}\end{matrix} ]$$

[0455] The reference gene expression vector is simply the geometric mean of those vectors:

$$[ \begin{matrix}{\overline{X}}_{1} \\ {\overline{X}}_{2} \\ ⋮ \\ {\overline{X}}_{n} \end{matrix} ] where {\overline{X}}_{1} is the geometric mean of \{ {A}_{1 ( geomean )} {B}_{1 ( geomean )} ⋯ {Z}_{1 ( geomean )} \}$$

[0456] The original data set is then transformed by taking the log of the ratio relative to the reference gene expression value for each gene creating the matrices {A′ B′ . . . Z′} where A′₁₁=ln(A₁₁/\overline{X}₁) and Z′_{nz}=ln(Z_{nz}/\overline{X}ₙ). The values now represent the fold increase or decrease over the average for each gene.

$$[ \begin{matrix}{A}_{11}^{′} & {A}_{12}^{′} & ⋯ & {A}_{1 a}^{′} \\ {A}_{21}^{′} & {A}_{22}^{′} & ⋯ & {A}_{2 a}^{′} \\ ⋮ & ⋯ & ⋰ & ⋮ \\ {A}_{n1}^{′} & {A}_{n2}^{′} & ⋯ & {A}_{n a}^{′}\end{matrix} ] [ \begin{matrix}{B}_{11}^{′} & {B}_{12}^{′} & ⋯ & {B}_{1 b}^{′} \\ {B}_{21}^{′} & {B}_{22}^{′} & ⋯ & {B}_{2 b}^{′} \\ ⋮ & ⋯ & ⋰ & ⋮ \\ {B}_{n1}^{′} & {B}_{n2}^{′} & ⋯ & {B}_{n b}^{′}\end{matrix} ] ⋯ [ \begin{matrix}{Z}_{11}^{′} & {Z}_{12}^{′} & ⋯ & {Z}_{1 z}^{′} \\ {Z}_{21}^{′} & {Z}_{22}^{′} & ⋯ & {Z}_{2 z}^{′} \\ ⋮ & ⋯ & ⋰ & ⋮ \\ {Z}_{n1}^{′} & {Z}_{n2}^{′} & ⋯ & {Z}_{n z}^{′}\end{matrix} ]$$

[0457] The genes with a weak differentiation power are removed from the matrix. The Kruskal-Wallis rank test was used to rank the genes with the highest differentiation power for separating the groups, A, B, . . . Z. A low p-value from the rank test indicates a high differentiation power. A p-value of 0.0025 was used as the cut-off value.

[0458] Finally, for each resulting matrix {A″ B″ . . . Z″}, apply a profile extraction algorithm to create a profile representing each group.

[0459] Profile extraction using the MaxCor algorithm. The MaxCor algorithm is applied to each group {A″ B″ . . . Z″}0 separately. For each pair of columns in the matrix, the genes coordinately expressed in high, average, or low levels over the mean (defined below) are given a value (1, 0, or −1, respectively), producing a weight vector representing the pair. Thus, for matrix A″,

$$( \frac{a ( a - 1 )}{2} ) ,$$

[0460] pairwise calculations are performed to produce a weight vector representing the matrix pair. A final average weight vector which will be the profile for group A, is computed by averaging each weight vector calculated for matrix A″. The profile contains the same number of genes as A″ and its values should be within [−1 to 1]. These values, −1 and 1, represent the genes consistently expressed in low or high levels, respectively, relative to the mean of all groups. The MaxCor algorithm is applied to each group individually to produce a profile for each group.

[0461] Value assignment for coordinately expressed genes. For a pair of columns (c1 and c2), the values are normalized to create c1′ and c2′. Thus, c1ᵢ becomes

$$( \frac{c {1}_{i} - \overline{c} 1}{{S}_{c1}} )$$

[0462] where \overline{c}1 is the mean of column c1 and S_{c1} is the standard deviation. For each gene pair in c1′ and c2′, the normalized values are stored as vector p12 and then the p12 values are sorted from lowest to highest. A cutoff value is established, such as 0.5, and all genes with a greater normalized value than the cutoff value are collected in p12. The Pearson correlation coefficient is calculated for this set of genes using the values in column c1 and c2. The cutoff value is then continually increased until the correlation coefficient is greater than a set value, such as 0.8. When this is complete, the set of genes meeting this criteria is assigned a value of 1 if both gene values in c1′ and c2′ are positive and −1 if both gene values are negative. For all other genes in c1′ and c2′, a zero value is assigned. The resulting vector is a weight vector which represents the pair.

[0463] Sample scoring using the MaxCor algorithm. Before scoring a new sample, the genes in the sample S with weak differentiation values are removed so that the rows remaining are the same as those in the profile vectors, thus creating sample vector S″. The score is the sum of the normalized values for each gene in S″ and its weight in the profile vector. For example, the score between sample vector S″ and profile vector A^{s} is

$${\sum }_{i = 1 - n} {S}_{i}^{′′} {A}_{i}^{s} \cdot$$

[0464] The normalized score is (score−mean of randomized score)/(standard deviation of randomized score), where the randomized score is the score between S″ and the profile vector which has its gene positions randomized. Typically, 100 randomized scores are generated to calculate the mean and the standard deviation.

[0465] Profile extraction using the Mean Log Ratio approach. This algorithm is also applied to each group or matrix {A″ B″ . . . Z″} individually. For each matrix, the profile vector is the row mean of the matrix. Thus, the profile vectors for groups {A″ B″ . . . Z″} are:

$$[ \begin{matrix}{\overline{A}}_{1}^{′′} \\ {\overline{A}}_{2}^{′′} \\ ⋮ \\ {\overline{A}}_{n}^{′′}\end{matrix} ] [ \begin{matrix}{\overline{B}}_{1}^{′′} \\ {\overline{B}}_{2}^{′′} \\ ⋮ \\ {\overline{B}}_{n}^{′′}\end{matrix} ] ⋯ [ \begin{matrix}{\overline{Z}}_{1}^{′′} \\ {\overline{Z}}_{2}^{′′} \\ ⋮ \\ {\overline{Z}}_{n}^{′′}\end{matrix} ] where {\overline{A}}_{1}^{′′} is the mean of \{ {A}_{11}^{′′} , {A}_{12}^{′′} , ⋯ {A}_{1 a}^{′′} \} \cdot$$

[0466] Sample scoring using the Mean Log Ratio expression profiles. Prior to scoring a new sample, the gene expression vector of the sample is transformed by taking the log ratio relative to the reference gene expression vector for each gene. For example, the transformation of the sample S is:

$$S = [ \begin{matrix}{S}_{1} \\ {S}_{2} \\ ⋮ \\ {S}_{n}\end{matrix} ] which leads to {S}^{′} = [ \begin{matrix}{S}_{1}^{′} \\ {S}_{2}^{′} \\ ⋮ \\ {S}_{n}^{′}\end{matrix} ] , where {S}_{1}^{′} = ln ( {S}_{1} \text{/} {\overline{X}}_{1} ) .$$

[0467] The genes with weak differentiation values are removed so the rows remaining are the same as those in the profile vectors, thus creating sample vector S″. The score against each profile is then calculated by taking the Euclidean distance between S″0 and the profile vector. The normalized score is (score−mean of randomized score)/(standard deviation of randomized score), where the randomized score is the Euclidean distance between S″ and the profile vector which has randomized gene positions. Typically, 100 randomized scores are generated to calculate the mean and the standard deviation.

### Example 3

### Gene Expression Profiles for Human Primary Cells

[0468] Gene expression profiles were collected from a set of human primary cells via DNA microarray technology. These gene expression profiles can then be used to classify unknown cell or tissue samples.

[0469] Thirty human primary cell samples were purchased from Clonetics Corporation (San Diego, Calif.). These primary cells were classified into the following categories: endothelial, epithelial, and muscle and also categorized based on the origin of tissue (FIG. 7). Total RNA was extracted, amplified, and labeled with Cy5-dCTP as described in Example 1. The resultant labeled cDNAs were hybridized to microarray chips, which contain 7286 DNA molecules representing 3643 unique genes each spotted twice. Each labeled cDNA probe was separated into two aliquots and each aliquot was hybridized to an identical microarray chip. Following a wash, the cDNA chips were scanned and the intensity of the spots was recorded and converted into a numerical value. To normalize the data, the spot intensities of each chip were divided by the intensity value of the 75th percentile of the chip, then these values were multiplied by 100. For each primary cell, a final gene intensity vector is produced by averaging four intensity values for each gene (2 spots per chip times 2 chips). The controls, low quality samples, and missing data values were removed, and 3940 genes were used for the final analysis.

[0470] Clustering analysis of the gene expression vectors of the primary cell samples confirmed that these samples could be classified into three groups: endothelial, epithelial, and muscle cell (FIG. 8). A reference vector was generated, and the intensities were converted into a log ratio. A gene was filtered from the matrix if the p-value from the Kruskal-Wallis rank test was greater than 0.0025.

[0471] The resultant transformed matrix, composed of 459 genes from the 30 primary cell types, was then used for profile extraction using the Mean Log Ratio algorithm as described (FIG. 9). Four expression profiles were generated, primary, endothelial, epithelial, and muscle (FIGS. 9, 10, 11, and 12). The primary profile represents 186 genes that may be used to classify primary cells. The endothelial profile represents 55 genes that may be used to classify endothelial cells. The epithelial profile represents 52 genes that may be used to classify epithelial cells. Finally, the muscle profile represents 40 genes that may be used to classify muscle cells. The sequence source (Seq. Source) is the gene database (GB: GenBank; and INCYTE: Incyte Genomes) that the sequence was selected from and the Seq ID is the accession number of the particular gene sequence. The endothelial, epithelial, and muscle profile values are the numeric representation of the specific profile. The p-value is based on the Kruskal-Wallis rank test in which smaller p-values represents clones with higher discriminate power for classifying samples. The source description identifies the particular gene.

[0472] These expression profiles are also shown graphically by assigning colors to the numeric values obtained (FIG. 13). The expression profiles were then used to classify the 30 primary cells by taking each transformed primary cell gene expression vector and scoring it against the three expression profiles separately using the Mean Log Ratio scoring algorithm. The results demonstrated that the endothelial, epithelial, and muscle cell types scored high against their own expression profiles but low against the other two expression profiles (FIG. 14).

[0473] In additional experiments, a different primary cell sample was removed from the profile generation step and then scored against the resultant profile. The results from this analysis were similar to that in FIG. 5 indicating that the expression profiles can be used to score against independent samples (FIG. 15).

[0474] The analysis was repeated using the MaxCor algorithm as described. The self-validation results are shown in FIG. 16 and the omit one analysis result in FIG. 17. The results are essentially the same as that from the Mean Log Ratio analysis.

[0475] FIG. 9 shows a gene expression profile for primary cells. Specifically, a primary cell gene expression profile may comprise one or more of the following nucleic acid sequences: SEQ ID NO: 1; SEQ ID NO: 2; SEQ ID NO: 3; SEQ ID NO: 4; SEQ ID NO: 5; SEQ ID NO: 6; SEQ ID NO: 7; SEQ ID NO: 8; SEQ ID NO: 9; SEQ ID NO: 10; SEQ ID NO: 1; SEQ ID NO: 12; SEQ ID NO: 13; SEQ ID NO: 14; SEQ ID NO: 15; SEQ ID NO: 16; SEQ ID NO: 17; SEQ ID NO: 18; SEQ ID NO: 19; SEQ ID NO: 20; SEQ ID NO: 21; SEQ ID NO: 22; SEQ ID NO: 23; SEQ ID NO: 24; SEQ ID NO: 25; SEQ ID NO: 26; SEQ ID NO: 27; SEQ ID NO: 28; SEQ ID NO: 29; SEQ ID NO: 30; SEQ ID NO: 31; SEQ ID NO: 32; SEQ ID NO: 33; SEQ ID NO: 34; SEQ ID NO: 35; SEQ ID NO: 36; SEQ ID NO: 37; SEQ ID NO: 38; SEQ ID NO: 39; SEQ ID NO: 40; SEQ ID NO: 41; SEQ ID NO: 42; SEQ ID NO: 43; SEQ ID NO: 44; SEQ ID NO: 45; SEQ ID NO: 46; SEQ ID NO: 47; SEQ ID NO: 48; SEQ ID NO: 49; SEQ ID NO: 50; SEQ ID NO: 51; SEQ ID NO: 52; SEQ ID NO: 53; SEQ ID NO: 54; SEQ ID NO: 55; SEQ ID NO: 56; SEQ ID NO: 57; SEQ ID NO: 58; SEQ ID NO: 59; SEQ ID NO: 60; SEQ ID NO: 61; SEQ ID NO: 62; SEQ ID NO: 63; SEQ ID NO: 64; SEQ ID NO: 65; SEQ ID NO: 66; SEQ ID NO: 67; SEQ ID NO: 68; SEQ ID NO: 69; SEQ ID NO: 70; SEQ ID NO: 71; SEQ ID NO: 72; SEQ ID NO: 73; SEQ ID NO: 74; SEQ ID NO: 75; SEQ ID NO: 76; SEQ ID NO: 77; SEQ ID NO: 78; SEQ ID NO: 79; SEQ ID NO: 80; SEQ ID NO: 81; SEQ ID NO: 82; SEQ ID NO: 83; SEQ ID NO: 84; SEQ ID NO: 85; SEQ ID NO: 86; SEQ ID NO: 87; SEQ ID NO: 88; SEQ ID NO: 89; SEQ ID NO: 90; SEQ ID NO: 91; SEQ ID NO: 92; SEQ ID NO: 93; SEQ ID NO: 94; SEQ ID NO: 95; SEQ ID NO: 96; SEQ ID NO: 97; SEQ ID NO: 98; SEQ ID NO: 99; SEQ ID NO: 100; SEQ ID NO: 101; SEQ ID NO: 102; SEQ ID NO: 103; SEQ ID NO: 104; SEQ ID NO: 105; SEQ ID NO: 106; SEQ ID NO: 107; SEQ ID NO: 108; SEQ ID NO: 109; SEQ ID NO: 110; SEQ ID NO: 111; SEQ ID NO: 112; SEQ ID NO: 113; SEQ ID NO: 114; SEQ ID NO: 115; SEQ ID NO: 116; SEQ ID NO: 117; SEQ ID NO: 118; SEQ ID NO: 119; SEQ ID NO: 120; SEQ ID NO: 121; SEQ ID NO: 122; SEQ ID NO: 123; SEQ ID NO: 124; SEQ ID NO: 125; SEQ ID NO: 126; SEQ ID NO: 127; SEQ ID NO: 128; SEQ ID NO: 129; SEQ ID NO: 130; SEQ ID NO: 131; SEQ ID NO: 132; SEQ ID NO: 133; SEQ ID NO: 134; SEQ ID NO: 135; SEQ ID NO: 136; SEQ ID NO: 137; SEQ ID NO: 138; SEQ ID NO: 139; SEQ ID NO: 140; SEQ ID NO: 141; SEQ ID NO: 142; SEQ ID NO: 143; SEQ ID NO: 144; SEQ ID NO: 145; SEQ ID NO: 146; SEQ ID NO: 147; SEQ ID NO: 148; SEQ ID NO: 149; SEQ ID NO: 150; SEQ ID NO: 151; SEQ ID NO: 152; SEQ ID NO: 153; SEQ ID NO: 154; SEQ ID NO: 155; SEQ ID NO: 156; SEQ ID NO: 157; SEQ ID NO: 158; SEQ ID NO: 159; SEQ ID NO: 160; SEQ ID NO: 161; SEQ ID NO: 162; SEQ ID NO: 163; SEQ ID NO: 164; SEQ ID NO: 165; SEQ ID NO: 166; SEQ ID NO: 167; SEQ ID NO: 168; SEQ ID NO: 169; SEQ ID NO: 170; SEQ ID NO: 171; SEQ ID NO: 172; SEQ ID NO: 173; SEQ ID NO: 174; SEQ ID NO: 175; SEQ ID NO: 176; SEQ ID NO: 177; SEQ ID NO: 178; SEQ ID NO: 179; SEQ ID NO: 180; SEQ ID NO: 181; SEQ ID NO: 182; SEQ ID NO: 183; SEQ ID NO: 184; SEQ ID NO: 185; and SEQ ID NO: 186. Accordingly, these sequences may be used to identify a primary cell gene expression profile, which then may be used to classify unknown cell or tissue samples.

[0476] A primary cell gene expression profile may additionally comprise one or more of the following nucleic acid sequences: SEQ ID NO: 188; SEQ ID NO: 193; SEQ ID NO: 216; SEQ ID NO: 224; SEQ ID NO: 230; SEQ ID NO: 248; SEQ ID NO: 249; SEQ ID NO: 250; SEQ ID NO: 253; SEQ ID NO: 271; SEQ ID NO: 281; SEQ ID NO: 324; SEQ ID NO: 337; SEQ ID NO: 346; SEQ ID NO: 388; SEQ ID NO: 403; SEQ ID NO: 410; SEQ ID NO: 415; SEQ ID NO: 421; SEQ ID NO: 422; SEQ ID NO: 425; SEQ ID NO: 427; SEQ ID NO: 428; SEQ ID NO: 432; SEQ ID NO: 433; SEQ ID NO: 437; SEQ ID NO: 440; SEQ ID NO: 443; SEQ ID NO: 444; SEQ ID NO: 447; SEQ ID NO: 449; SEQ ID NO: 451; SEQ ID NO: 452; SEQ ID NO: 455; SEQ ID NO: 457; SEQ ID NO: 460; SEQ ID NO: 462; SEQ ID NO: 465; SEQ ID NO: 466; SEQ ID NO: 476; SEQ ID NO: 477; SEQ ID NO: 482; SEQ ID NO: 484; SEQ ID NO: 490; SEQ ID NO: 492; SEQ ID NO: 493; SEQ ID NO: 495; SEQ ID NO: 498; SEQ ID NO: 499; SEQ ID NO: 502; SEQ ID NO: 504; SEQ ID NO: 505; SEQ ID NO: 514; SEQ ID NO: 515; SEQ ID NO: 518; SEQ ID NO: 524; SEQ ID NO: 528; SEQ ID NO: 530; SEQ ID NO: 531; SEQ ID NO: 532; SEQ ID NO: 536; SEQ ID NO: 539; SEQ ID NO: 541; SEQ ID NO: 545; SEQ ID NO: 551; SEQ ID NO: 563; SEQ ID NO: 565; SEQ ID NO: 567; SEQ ID NO: 573; SEQ ID NO: 577; SEQ ID NO: 580; SEQ ID NO: 582; SEQ ID NO: 585; SEQ ID NO: 588; SEQ ID NO: 590; SEQ ID NO: 592; SEQ ID NO: 594; SEQ ID NO: 595; SEQ ID NO: 598; SEQ ID NO: 599; SEQ ID NO: 601; SEQ ID NO: 605; SEQ ID NO: 607; SEQ ID NO: 608; SEQ ID NO: 613; SEQ ID NO: 623; SEQ ID NO: 625; SEQ ID NO: 626; SEQ ID NO: 631; SEQ ID NO: 650; SEQ ID NO: 652; SEQ ID NO: 654; SEQ ID NO: 657; SEQ ID NO: 661; SEQ ID NO: 665; SEQ ID NO: 671; SEQ ID NO: 672; SEQ ID NO: 673; SEQ ID NO: 674; SEQ ID NO: 675; SEQ ID NO: 676; SEQ ID NO: 677; SEQ ID NO: 678; SEQ ID NO: 680; SEQ ID NO: 681; SEQ ID NO: 684; SEQ ID NO: 685; SEQ ID NO: 686; SEQ ID NO: 687; SEQ ID NO: 688; SEQ ID NO: 689; SEQ ID NO: 690; SEQ ID NO: 691; SEQ ID NO: 692; SEQ ID NO: 694; SEQ ID NO: 695; SEQ ID NO: 696; SEQ ID NO: 697; SEQ ID NO: 698; SEQ ID NO: 699; SEQ ID NO: 700; SEQ ID NO: 701; SEQ ID NO: 702; SEQ ID NO: 704; SEQ ID NO: 705; SEQ ID NO: 706; SEQ ID NO: 707; SEQ ID NO: 708; SEQ ID NO: 709; SEQ ID NO: 710; SEQ ID NO: 711; SEQ ID NO: 712; SEQ ID NO: 713; SEQ ID NO: 714; SEQ ID NO: 715; SEQ ID NO: 716; SEQ ID NO: 717; SEQ ID NO: 718; SEQ ID NO: 719; SEQ ID NO: 720; SEQ ID NO: 721; SEQ ID NO: 722; SEQ ID NO: 723; SEQ ID NO: 724; SEQ ID NO: 725; SEQ ID NO: 726; SEQ ID NO: 727; SEQ ID NO: 728; SEQ ID NO: 729; SEQ ID NO: 730; SEQ ID NO: 731; SEQ ID NO: 732; SEQ ID NO: 733; SEQ ID NO: 734; SEQ ID NO: 735; SEQ ID NO: 736; SEQ ID NO: 737; SEQ ID NO: 738; SEQ ID NO: 739; SEQ ID NO: 740; SEQ ID NO: 741; SEQ ID NO: 742; SEQ ID NO: 743; SEQ ID NO: 744; SEQ ID NO: 745; SEQ ID NO: 746; SEQ ID NO: 747; SEQ ID NO: 748; SEQ ID NO: 749; SEQ ID NO: 750; SEQ ID NO: 751; SEQ ID NO: 752; SEQ ID NO: 753; SEQ ID NO: 754; SEQ ID NO: 755; SEQ ID NO: 756; SEQ ID NO: 758; SEQ ID NO: 759; SEQ ID NO: 760; SEQ ID NO: 761; SEQ ID NO: 762; SEQ ID NO: 763; SEQ ID NO: 764; SEQ ID NO: 765; SEQ ID NO: 766; SEQ ID NO: 767; SEQ ID NO: 768; SEQ ID NO: 769; SEQ ID NO: 770; SEQ ID NO: 771; SEQ ID NO: 772; SEQ ID NO: 773; SEQ ID NO: 774; SEQ ID NO: 775; SEQ ID NO: 776; SEQ ID NO: 777; SEQ ID NO: 778; SEQ ID NO: 779; SEQ ID NO: 780; SEQ ID NO: 781; SEQ ID NO: 782; SEQ ID NO: 783; SEQ ID NO: 784; SEQ ID NO: 785; SEQ ID NO: 786; SEQ ID NO: 787; SEQ ID NO: 788; SEQ ID NO: 789; SEQ ID NO: 790; SEQ ID NO: 791; SEQ ID NO: 792; SEQ ID NO: 793; SEQ ID NO: 794; SEQ ID NO: 795; SEQ ID NO: 796; SEQ ID NO: 797; SEQ ID NO: 798; SEQ ID NO: 799; SEQ ID NO: 800; SEQ ID NO: 801; SEQ ID NO: 802; and SEQ ID NO: 803.

[0477] As the example shows, primary cell gene expression profile may also comprise, for instance, the nucleic acid sequences having the following accession numbers: INCYTE 2997284H1; INCYTE 1726828F6; INCYTE 1690295F6; INCYTE 530695T6; INCYTE 2313677H1; INCYTE 2510757F6; INCYTE 1696122T6; GB M20566; INCYTE 1742456R6; INCYTE 3584702H1; INCYTE 2222054H1; INCYTE 928019R6; INCYTE 1716001T6; INCYTE 2211526T6; INCYTE 2604309F6; INCYTE 3269857F6; INCYTE 1751294F6; INCYTE 3118530H1; INCYTE 1519824H1; INCYTE 1429303H1; INCYTE 449937H1; INCYTE 150224T6; INCYTE 1652456H1; INCYTE 2116716T6; INCYTE 637471CA2; INCYTE 3105066H1; INCYTE 1946704H1; INCYTE 5547273H1; INCYTE 2194901H1; INCYTE 3097063H1; INCYTE 399998H1; INCYTE 3320154H1; GB X87344; INCYTE 2169635T6; and INCYTE 767295H1.

[0478] FIG. 10 displays the genes that comprise an endothelial gene expression profile. Specifically, an endothelial gene expression profile may comprise one or more nucleic acid sequences including, but not limited to, SEQ ID NO: 1; SEQ ID NO: 2; SEQ ID NO: 3; SEQ ID NO: 4; SEQ ID NO: 5; SEQ ID NO: 6; SEQ ID NO: 7; SEQ ID NO: 8; SEQ ID NO: 9; SEQ ID NO: 10; SEQ ID NO: 11; SEQ ID NO: 12; SEQ ID NO: 13; SEQ ID NO: 14; SEQ ID NO: 15; SEQ ID NO: 16; SEQ ID NO: 17; SEQ ID NO: 18; SEQ ID NO: 19; SEQ ID NO: 20; SEQ ID NO: 21; SEQ ID NO: 22; SEQ ID NO: 23; SEQ ID NO: 48; SEQ ID NO: 63; SEQ ID NO: 70; SEQ ID NO: 82; SEQ ID NO: 94; and SEQ ID NO: 144. Accordingly, these sequences may be used to identify an endothelial gene expression profile, which then may be used to classify unknown cell or tissue samples.

[0479] An endothelial gene expression profile may additionally comprise one or more nucleic acid sequences including, but not limited to, SEQ ID NO: 427; SEQ ID NO: 460; SEQ ID NO: 484; SEQ ID NO: 565; SEQ ID NO: 580; SEQ ID NO: 590; SEQ ID NO: 670; SEQ ID NO: 672; SEQ ID NO: 673; SEQ ID NO: 674; SEQ ID NO: 675; SEQ ID NO: 676; SEQ ID NO: 677; SEQ ID NO: 678; SEQ ID NO: 680; SEQ ID NO: 723; SEQ ID NO: 741; and SEQ ID NO: 754.

[0480] As the example shows, an endothelial gene expression profile may also comprise, for example, the nucleic acid sequences having the following accession numbers: INCYTE 530695T6 and INCYTE 1716001T6.

[0481] The gene expression profile depicted in FIG. 11 may be used to identify epithelial cells. Specifically, an epithelial gene expression profile may comprise one or more nucleic acid sequences including, but not limited to, SEQ ID NO: 47; SEQ ID NO: 60; SEQ ID NO: 67; SEQ ID NO: 73; SEQ ID NO: 75; SEQ ID NO: 76; SEQ ID NO: 77; SEQ ID NO: 78; SEQ ID NO: 80; SEQ ID NO: 96; SEQ ID NO: 98; SEQ ID NO: 99; SEQ ID NO: 111; SEQ ID NO: 112; SEQ ID NO: 117; SEQ ID NO: 123; SEQ ID NO: 127; SEQ ID NO: 131; SEQ ID NO: 150; SEQ ID NO: 153; SEQ ID NO: 154; SEQ ID NO: 155; SEQ ID NO: 156; SEQ ID NO: 157; SEQ ID NO: 158; SEQ ID NO: 159; SEQ ID NO: 160; SEQ ID NO: 161; SEQ ID NO: 162; SEQ ID NO: 163; SEQ ID NO: 164; SEQ ID NO: 165; SEQ ID NO: 166; SEQ ID NO: 167; SEQ ID NO: 168; SEQ ID NO: 169; SEQ ID NO: 170; SEQ ID NO: 171; SEQ ID NO: 172; SEQ ID NO: 173; SEQ ID NO: 174; SEQ ID NO: 175; SEQ ID NO: 176; SEQ ID NO: 177; SEQ ID NO: 178; SEQ ID NO: 179; SEQ ID NO: 180; SEQ ID NO: 181; SEQ ID NO: 182; SEQ ID NO: 183; SEQ ID NO: 184; SEQ ID NO: 185; SEQ ID NO: 186.

[0482] FIG. 12 shows the gene expression profile generated from muscle cells. In one embodiment, a muscle cell gene expression profile may comprise one or more nucleic acid sequences including, but not limited to, SEQ ID NO: 24; SEQ ID NO: 25; SEQ ID NO: 26; SEQ ID NO: 27; SEQ ID NO: 28; SEQ ID NO: 29; SEQ ID NO: 30; SEQ ID NO: 31; SEQ ID NO: 32; SEQ ID NO: 33; SEQ ID NO: 34; SEQ ID NO: 35; SEQ ID NO: 36; SEQ ID NO: 37; SEQ ID NO: 38; SEQ ID NO: 39; SEQ ID NO: 40; SEQ ID NO: 41; SEQ ID NO: 42; SEQ ID NO: 54; SEQ ID NO: 55; and SEQ ID NO: 69. Accordingly, these sequences may be used to identify a muscle gene expression profile, which then may be used to classify unknown cell or tissue samples.

[0483] A muscle gene expression profile may additionally comprise one or more nucleic acid sequences including, but not limited to, SEQ ID NO: 188; SEQ ID NO: 193; SEQ ID NO: 216; SEQ ID NO: 250; SEQ ID NO: 499; SEQ ID NO: 504; SEQ ID NO: 563; SEQ ID NO: 652; SEQ ID NO: 681; SEQ ID NO: 682; SEQ ID NO: 683; SEQ ID NO: 684; SEQ ID NO: 685; SEQ ID NO: 686; SEQ ID NO: 687; SEQ ID NO: 688; SEQ ID NO: 689; SEQ ID NO: 690; and SEQ ID NO: 691.

### Example 4

### Gene Expression Profiles for Epithelial Cell Subtypes

[0484] Gene expression profiles that define a particular type of epithelial cell were generated using the methodologies, microarrays and algorithms of the present invention. Epithelial cell lines were used to generate the cell type specific gene expression profiles. The epithelial cell lines used in this example were derived from various tissues including keratinocyte epithelium, mammary epithelium, bronchial epithelium, prostate epithelium, renal cortical epithelium, renal proximal tubule epithelium, small airway epithelium, and renal epithelium.

[0485] Complementary DNA made from each of the eight cell lines was used to probe the microarray. Briefly, and as described in the previous examples, total RNA was extracted, amplified, and labeled. The resultant labeled cDNAs were hybridized to microarray chips. Following one or more washing steps, the microarrays were scanned and the intensity of the spots was recorded and converted into a numerical value and normalized. Next, the alogrithms of the present invention were applied to extract a gene expression profile that defined the subtype of epithelial cell.

[0486] The microarrays used in this example comprised the following nucleic acid sequences: SEQ ID NO: 187; SEQ ID NO: 188; SEQ ID NO: 189; SEQ ID NO: 190; SEQ ID NO: 191; SEQ ID NO: 192; SEQ ID NO: 193; SEQ ID NO: 194; SEQ ID NO: 195; SEQ ID NO: 196; SEQ ID NO: 197; SEQ ID NO: 198; SEQ ID NO: 199; SEQ ID NO: 200; SEQ ID NO: 201; SEQ ID NO: 202; SEQ ID NO: 203; SEQ ID NO: 204; SEQ ID NO: 205; SEQ ID NO: 206; SEQ ID NO: 207; SEQ ID NO: 208; SEQ ID NO: 209; SEQ ID NO: 210; SEQ ID NO: 211; SEQ ID NO: 150; SEQ ID NO: 27; SEQ ID NO: 169; SEQ ID NO: 212; SEQ ID NO: 213; SEQ ID NO: 131; SEQ ID NO: 214; SEQ ID NO: 215; SEQ ID NO: 216; SEQ ID NO: 217; SEQ ID NO: 218; SEQ ID NO: 138; SEQ ID NO: 219; SEQ ID NO: 220; SEQ ID NO: 221; SEQ ID NO: 222; SEQ ID NO: 223; SEQ ID NO: 224; SEQ ID NO: 225; SEQ ID NO: 226; SEQ ID NO: 227; SEQ ID NO: 228; SEQ ID NO: 229; SEQ ID NO: 230; SEQ ID NO: 231; SEQ ID NO: 232; SEQ ID NO: 78; SEQ ID NO: 233; SEQ ID NO: 234; SEQ ID NO: 235; SEQ ID NO: 236; SEQ ID NO: 237; SEQ ID NO: 238; SEQ ID NO: 239; SEQ ID NO: 240; SEQ ID NO: 241; SEQ ID NO: 242; SEQ ID NO: 243; SEQ ID NO: 64; SEQ ID NO: 244; SEQ ID NO: 245; SEQ ID NO: 246; SEQ ID NO: 247; SEQ ID NO: 248; SEQ ID NO: 249; SEQ ID NO: 250; SEQ ID NO: 251; SEQ ID NO: 252; SEQ ID NO: 253; SEQ ID NO: 254; SEQ ID NO: 37; SEQ ID NO: 106; SEQ ID NO: 255; SEQ ID NO: 123; SEQ ID NO: 256; SEQ ID NO: 257; SEQ ID NO: 258; SEQ ID NO: 259; SEQ ID NO: 260; SEQ ID NO: 261; SEQ ID NO: 262; SEQ ID NO: 263; SEQ ID NO: 264; SEQ ID NO: 265; SEQ ID NO: 266; SEQ ID NO: 267; SEQ ID NO: 268; SEQ ID NO: 269; SEQ ID NO: 57; SEQ ID NO: 70; SEQ ID NO: 270; SEQ ID NO: 271; SEQ ID NO: 272; SEQ ID NO: 273; SEQ ID NO: 274; SEQ ID NO: 275; SEQ ID NO: 276; SEQ ID NO: 277; SEQ ID NO: 278; SEQ ID NO: 279; SEQ ID NO: 104; SEQ ID NO: 280; SEQ ID NO: 281; SEQ ID NO: 282; SEQ ID NO: 283; SEQ ID NO: 284; SEQ ID NO: 285; SEQ ID NO: 286; SEQ ID NO: 287; SEQ ID NO: 288; SEQ ID NO: 160; SEQ ID NO: 289; SEQ ID NO: 290; SEQ ID NO: 291; SEQ ID NO: 293; SEQ ID NO: 294; SEQ ID NO: 295; SEQ ID NO: 296; SEQ ID NO: 297; SEQ ID NO: 49; SEQ ID NO: 298; SEQ ID NO: 299; SEQ ID NO: 300; SEQ ID NO: 301; SEQ ID NO: 302; SEQ ID NO: 303; SEQ ID NO: 304; SEQ ID NO: 305; SEQ ID NO: 306; SEQ ID NO: 307; SEQ ID NO: 308; SEQ ID NO: 183; SEQ ID NO: 309; SEQ ID NO: 310; SEQ ID NO: 311; SEQ ID NO: 312; SEQ ID NO: 313; SEQ ID NO: 314; SEQ ID NO: 315; SEQ ID NO: 316; SEQ ID NO: 310; SEQ ID NO: 317; SEQ ID NO: 174; SEQ ID NO: 318; SEQ ID NO: 320; SEQ ID NO: 173; SEQ ID NO: 321; SEQ ID NO: 322; SEQ ID NO: 323; SEQ ID NO: 324; SEQ ID NO: 325; SEQ ID NO: 326; SEQ ID NO: 158; SEQ ID NO: 327; SEQ ID NO: 328; SEQ ID NO: 165; SEQ ID NO: 166; SEQ ID NO: 329

[0487] FIG. 18 shows the results from all eight of the hybridizations. The cutoff value was set for expression values over 2.0, i.e., two-fold induction over baseline. This particular portrayal of the data shows the relative expression values sorted for keratinocyte epithelial cells. Several genes, specifically, nucleic acid sequences SEQ ID NO: 187; SEQ ID NO: 188; SEQ ID NO: 189; SEQ ID NO: 190; SEQ ID NO: 191; SEQ ID NO: 192; SEQ ID NO: 193; SEQ ID NO: 194; SEQ ID NO: 195; SEQ ID NO: 196; SEQ ID NO: 197; SEQ ID NO: 198; SEQ ID NO: 199; SEQ ID NO: 200; SEQ ID NO: 201; SEQ ID NO: 202; SEQ ID NO: 203; SEQ ID NO: 204; SEQ ID NO: 205; SEQ ID NO: 206; SEQ ID NO: 207; SEQ ID NO: 208; SEQ ID NO: 209; SEQ ID NO: 210; and SEQ ID NO: 211, show a relative expression value over 2.0, which is the cut-off in the context of the algorithm. These genes represent signature genes, i.e., a gene expression profile of keratinocyte epithelial cells, which may be used to identify and classify unkown samples.

[0488] With regard to the other columns, it is possible to sort the data and identify genes representing gene expression profiles of a particular cell type. For example, and referring to FIG. 18, sorting the data based on relative expression values and using the value of 2.0 as a cutoff in the context of the algorithm, the following genes represent a mammary epithelial cells gene expression profile: SEQ ID NO: 212; SEQ ID NO: 213; SEQ ID NO: 216; SEQ ID NO: 225; SEQ ID NO: 226; SEQ ID NO: 227; SEQ ID NO: 78; SEQ ID NO: 239; SEQ ID NO: 271; SEQ ID NO: 285; and SEQ ID NO: 289.

[0489] Similarly, and referring to FIG. 18, sorting the data based on relative expression values and using the value of 2.0 as a cutoff in the context of the algorithm, the following genes represent a bronchial epithelial cells gene expression profile: SEQ ID NO: 150; SEQ ID NO: 27; SEQ ID NO: 169; SEQ ID NO: 131; SEQ ID NO: 214; SEQ ID NO: 215; SEQ ID NO: 223; SEQ ID NO: 224; SEQ ID NO: 241; SEQ ID NO: 243; SEQ ID NO: 244; SEQ ID NO: 255; SEQ ID NO: 256; SEQ ID NO: 261; and SEQ ID NO: 314.

[0490] Referring to FIG. 18, sorting the data based on relative expression values and using the value of 2.0 as a cutoff in the context of the algorithm, the following genes represent a prostate epithelial cells gene expression profile: SEQ ID NO: 217; SEQ ID NO: 218; SEQ ID NO: 64; SEQ ID NO: 259; SEQ ID NO: 293; SEQ ID NO: 302; and SEQ ID NO: 320.

[0491] Likewise, referring to FIG. 18, sorting the data based on relative expression values and using the value of 2.0 as a cutoff in the context of the algorithm, the following genes represent a renal cortical epithelial cells gene expression profile: SEQ ID NO: 219; SEQ ID NO: 123; SEQ ID NO: 267; SEQ ID NO: 57; SEQ ID NO: 270; SEQ ID NO: 279; SEQ ID NO: 104; SEQ ID NO: 28; SEQ ID NO: 283; SEQ ID NO: 160; SEQ ID NO: 291; SEQ ID NO: 300; SEQ ID NO: 305; SEQ ID NO: 307; SEQ ID NO: 310; SEQ ID NO: 313; SEQ ID NO: 310; SEQ ID NO: 325; SEQ ID NO: 326; SEQ ID NO: 327; SEQ ID NO: 165; and SEQ ID NO: 166.

[0492] Referring to FIG. 18, sorting the data based on relative expression values and using the value of 2.0 as a cutoff in the context of the algorithm, the following genes represent a renal proximal tubule epithelial cells gene expression profile: SEQ ID NO: 106; SEQ ID NO: 138; SEQ ID NO: 158; SEQ ID NO: 228; SEQ ID NO: 236; SEQ ID NO: 242; SEQ ID NO: 250; SEQ ID NO: 258; SEQ ID NO: 260; SEQ ID NO: 262; SEQ ID NO: 266; SEQ ID NO: 272; SEQ ID NO: 273; SEQ ID NO: 274; SEQ ID NO: 275; SEQ ID NO: 276; SEQ ID NO: 278; SEQ ID NO: 284; SEQ ID NO: 288; SEQ ID NO: 295; SEQ ID NO: 296; SEQ ID NO: 297; SEQ ID NO: 299; SEQ ID NO: 300; SEQ ID NO: 301; SEQ ID NO: 306; SEQ ID NO: 308; SEQ ID NO: 309; SEQ ID NO: 311; SEQ ID NO: 316; SEQ ID NO: 318; SEQ ID NO: 321; SEQ ID NO: 322; SEQ ID NO: 328; and SEQ ID NO: 329.

[0493] Moreoever, and referring to FIG. 18, sorting the data based on relative expression values and using the value of 2.0 as a cutoff in the context of the algorithm, the following genes represent a small airway epithelial cells gene expression profile: SEQ ID NO: 173; SEQ ID NO: 174; SEQ ID NO: 183; SEQ ID NO: 220; SEQ ID NO: 221; SEQ ID NO: 222; SEQ ID NO: 229; SEQ ID NO: 230; SEQ ID NO: 231; SEQ ID NO: 232; SEQ ID NO: 233; SEQ ID NO: 234; SEQ ID NO: 235; SEQ ID NO: 237; SEQ ID NO: 238; SEQ ID NO: 240; SEQ ID NO: 245; SEQ ID NO: 246; SEQ ID NO: 247; SEQ ID NO: 248; SEQ ID NO: 249; SEQ ID NO: 251; SEQ ID NO: 252; SEQ ID NO: 254; SEQ ID NO: 257; SEQ ID NO: 263; SEQ ID NO: 264; SEQ ID NO: 265; SEQ ID NO: 268; SEQ ID NO: 269; SEQ ID NO: 270; SEQ ID NO: 277; SEQ ID NO: 281; SEQ ID NO: 282; SEQ ID NO: 286; SEQ ID NO: 287; SEQ ID NO: 290; SEQ ID NO: 294; SEQ ID NO: 298; SEQ ID NO: 303; SEQ ID NO: 312; SEQ ID NO: 315; SEQ ID NO: 317; and SEQ ID NO: 319.

[0494] Still further, and referring to FIG. 18, sorting the data based on relative expression values and using the value of 2.0 as a cutoff in the context of the algorithm, the following genes represent a renal epithelial cells gene expression profile: SEQ ID NO: 37; SEQ ID NO: 253; SEQ ID NO: 304; SEQ ID NO: 323; and SEQ ID NO: 324.

### Example 5

### Rat Toxicology Reference Database

[0495] To assess the toxicity of known compounds on gene and/or protein expression, a rat expression database is constructed. The database consists of gene expression profiles and protein expression profiles, as well as serum chemistry, hematology measurements, histopathology, and general clinical observations, from 100 different compounds at two doses and at two timepoints per dose. The compounds contain at least 10 different mechanisms of liver and kidney toxicity.

[0496] Sprague-Dawley rats are treated with compound via intraperitoneal administration. Dose groups include a low dose and a high dose for a 24-hour exposure and a low dose and a high dose for a 72-hour exposure. Three animals are treated per dose group as well as two control animal per timepoint. Following treatment, tissue are collected for gene expression and/or protein expression analysis including liver, kidney, white blood cells, lung, heart, intestine, testes, and spleen. Other toxicological evaluations include serum chemistry, hematology, organ weights, animal weights, and clinical observations.

[0497] Dose selection is based on literature reports with low dose defined as the lowest historical dose that elicited an endpoint and high dose is defined as the dose reported to result in a significant number of animals exhibiting characteristic toxicity.

[0498] The toxic effects of these compounds on gene expression and protein expression are analyzed using a toxicity microarray. For each compound, 15 rats are treated with the compound and tissue samples from each rat are collected and analyzed. The expression patterns in liver, kidney, heart, brain, intestine, testes, spleen, and white blood cells are analyzed following treatment with a toxic compounds. To generate the target nucleic acids, RNA or protein is isolated from each tissue sample and prepared for microarray hybridization as described above. Genes and/or proteins demonstrating alterations in expression level are selected for inclusion on the rat toxicity microarray. In addition, approximately 600 genes and/or protein-capture agents derived therefrom identified as toxicologically relevant based on review of the scientific literature are also be included on the microarray. In total, about 4,000 cDNAs or protein-capture agents reflecting the genes and/or proteins susceptible to the toxicity of these compounds.

[0499] Data reflecting the gene expression profiles of each tissue and toxin is placed in the database including an annotation describing dosage and clinical observations The database provides information describing mechanisms of action as well as previously reported alterations of gene expression observed following administration of these compounds. The database is also used in the drug discovery process by providing information which permits the elimination of potentially toxic compounds.

### Example 6

### Expression Profiles as a Diagnostic for Disease

[0500] The microarray technology may also be used to identify a particular disease (e.g., cancer), and provide a patient diagnosis. Initially, reference genes and/or proteins are generated for both normal and cancer cell types. Isolated cell types are derived by a number of methods known in the art (e.g., FACS sorting, magnoferric solutions, magnetic beads in combination with cell-specific antibodies). Cells from tissues are isolated by tissue staining with a cell-specific antibody, followed by laser capture microscopy or electrostatic methods. RNA is isolated from the cells and then probes are created for the generation of microarrays using the methods described above. Similarly, protein may be isolated from the cells and used to probe a microarray comprising protein-capture agnets using the methods described above.

[0501] Data from the microarrays for each cell type is then placed in a database along with an annotation describing cell type and location. Using cluster analysis and algorithms, gene and/or protein expression profiles for each cell type are determined.

[0502] For a diagnosis of Hodgkin lymphoma or non-Hodgkin lymphoma, biological samples are collected from patients and RNA or protein is isolated from the samples, as described above. The cDNA or protein is then hybridized to microarrays containing genes or protein-capture agents representing normal, Hodgkin lymphoma, and non-Hodgkin lymphoma samples. Based on the gene expression profiles and/or protein expression profiles, patients are diagnosed with either Hodgkin lymphoma or non-Hodgkin lymphoma.

[0503] The expression data from these patient samples is then added to the database. In addition, clinical information regarding the patient and treatment course as well as clinical outcome are also included in the database; thus, providing expression profiles for disease, disease stage, and outcome.

[0504] Microarray technology is also used to identify a course of treatment and as a drug discovery method. Normal and tumorogenic cells are treated with a known cancer drug (e.g., tamoxifen) or a novel pharmacological agent. As described above, RNA or protein is isolated and then hybridized to a microarray containing normal and cancer cell genes or protein-capture agents. A comparison of the expression levels following treatment provides an expression profile of the particular drug indicating which genes or proteins are activated or deactivated by the drug. This information is also added to the database. The database thus contains information describing the gene expression profiles and/or protein expression profiles of normal and cancer cells, gene expression profiles and/or protein expression profiles of patient samples, gene expression profiles and/or protein expression profiles of patients undergoing treatment, and gene expression profiles and/or protein expression profiles of in vitro cell studies. This information is used to diagnose and classify a disease, select and monitor a treatment course, and identify a prognostic indicator.

[0505] Various modifications and variations of the described methods and systems of the invention will be apparent to those skilled in the art without departing from the scope and spirit of the invention. Although the invention has been described in connection with specific preferred embodiments, it should be understood that the invention as claimed should not be unduly limited to such specific embodiments. Indeed, various modifications of the described modes for carrying out the invention which are obvious to those skilled in molecular biology or related fields are intended to be within the scope of the following claims.

We claim:

1. An endothelial cell gene expression profile comprising one or more nucleic acid sequences substantially homologous to a nucleic acid sequence or complementary sequence thereof selected from the group selected from the group consisting of SEQ ID NO: 1; SEQ ID NO: 2; SEQ ID NO: 3; SEQ ID NO: 4; SEQ ID NO: 5; SEQ ID NO: 6; SEQ ID NO: 7; SEQ ID NO: 8; SEQ ID NO: 9; SEQ ID NO: 10; SEQ ID NO: 11; SEQ ID NO: 12; SEQ ID NO: 13; SEQ ID NO: 14; SEQ ID NO: 15; SEQ ID NO: 16; SEQ ID NO: 17; SEQ ID NO: 18; SEQ ID NO: 19; SEQ ID NO: 20; SEQ ID NO: 21; SEQ ID NO: 22; SEQ ID NO: 23; SEQ ID NO: 48; SEQ ID NO: 63; SEQ ID NO: 70; SEQ ID NO: 82; SEQ ID NO: 94; and SEQ ID NO: 144.

2. A muscle cell gene expression profile comprising one or more nucleic acid sequences substantially homologous to a nucleic acid sequence or complementary sequence thereof selected from the group selected from the group consisting of SEQ ID NO: 24; SEQ ID NO: 25; SEQ ID NO: 26; SEQ ID NO: 27; SEQ ID NO: 28; SEQ ID NO: 29; SEQ ID NO: 30; SEQ ID NO: 31; SEQ ID NO: 32; SEQ ID NO: 33; SEQ ID NO: 34; SEQ ID NO: 35; SEQ ID NO: 36; SEQ ID NO: 37; SEQ ID NO: 39; SEQ ID NO: 40; SEQ ID NO: 41; SEQ ID NO: 42; SEQ ID NO: 54; SEQ ID NO: 55; and SEQ ID NO: 69.

3. A primary cell gene expression profile comprising one or more nucleic acid sequences substantially homologous to a nucleic acid sequence or complementary sequence thereof selected from the group selected from the group consisting of SEQ ID NO: 1; SEQ ID NO: 2; SEQ ID NO: 3; SEQ ID NO: 4; SEQ ID NO: 5; SEQ ID NO: 6; SEQ ID NO: 7; SEQ ID NO: 8; SEQ ID NO: 9; SEQ ID NO: 10; SEQ ID NO: 11; SEQ ID NO: 12; SEQ ID NO: 13; SEQ ID NO: 14; SEQ ID NO: 15; SEQ ID NO: 16; SEQ ID NO: 17; SEQ ID NO: 18; SEQ ID NO: 19; SEQ ID NO: 20; SEQ ID NO: 21; SEQ ID NO: 22; SEQ ID NO: 23; SEQ ID NO: 24; SEQ ID NO: 25; SEQ ID NO: 26; SEQ ID NO: 27; SEQ ID NO: 28; SEQ ID NO: 29; SEQ ID NO: 30; SEQ ID NO: 31; SEQ ID NO: 32; SEQ ID NO: 33; SEQ ID NO: 34; SEQ ID NO: 35; SEQ ID NO: 36; SEQ ID NO: 37; SEQ ID NO: 39; SEQ ID NO: 40; SEQ ID NO: 41; SEQ ID NO: 42; SEQ ID NO: 43; SEQ ID NO: 44; SEQ ID NO: 45; SEQ ID NO: 46; SEQ ID NO: 47; SEQ ID NO: 48; SEQ ID NO: 49; SEQ ID NO: 50; SEQ ID NO: 51; SEQ ID NO: 52; SEQ ID NO: 53; SEQ ID NO: 54; SEQ ID NO: 55; SEQ ID NO: 56; SEQ ID NO: 57; SEQ ID NO: 58; SEQ ID NO: 59; SEQ ID NO: 60; SEQ ID NO: 61; SEQ ID NO: 62; SEQ ID NO: 63; SEQ ID NO: 64; SEQ ID NO: 65; SEQ ID NO: 66; SEQ ID NO: 67; SEQ ID NO: 68; SEQ ID NO: 69; SEQ ID NO: 70; SEQ ID NO: 71; SEQ ID NO: 72; SEQ ID NO: 73; SEQ ID NO: 74; SEQ ID NO: 75; SEQ ID NO: 76; SEQ ID NO: 77; SEQ ID NO: 78; SEQ ID NO: 79; SEQ ID NO: 80; SEQ ID NO: 81; SEQ ID NO: 82; SEQ ID NO: 83; SEQ ID NO: 84; SEQ ID NO: 85; SEQ ID NO: 86; SEQ ID NO: 87; SEQ ID NO: 88; SEQ ID NO: 89; SEQ ID NO: 90; SEQ ID NO: 91; SEQ ID NO: 92; SEQ ID NO: 93; SEQ ID NO: 94; SEQ ID NO: 95; SEQ ID NO: 96; SEQ ID NO: 97; SEQ ID NO: 98; SEQ ID NO: 99; SEQ ID NO: 100; SEQ ID NO: 101; SEQ ID NO: 102; SEQ ID NO: 103; SEQ ID NO: 104; SEQ ID NO: 105; SEQ ID NO: 106; SEQ ID NO: 107; SEQ ID NO: 108; SEQ ID NO: 109; SEQ ID NO: 110; SEQ ID NO: 111; SEQ ID NO: 112; SEQ ID NO: 113; SEQ ID NO: 114; SEQ ID NO: 115; SEQ ID NO: 116; SEQ ID NO: 118; SEQ ID NO: 119; SEQ ID NO: 120; SEQ ID NO: 121; SEQ ID NO: 122; SEQ ID NO: 123; SEQ ID NO: 124; SEQ ID NO: 125; SEQ ID NO: 126; SEQ ID NO: 127; SEQ ID NO: 128; SEQ ID NO: 129; SEQ ID NO: 130; SEQ ID NO: 131; SEQ ID NO: 132; SEQ ID NO: 133; SEQ ID NO: 134; SEQ ID NO: 135; SEQ ID NO: 136; SEQ ID NO: 137; SEQ ID NO: 138; SEQ ID NO: 139; SEQ ID NO: 140; SEQ ID NO: 141; SEQ ID NO: 142; SEQ ID NO: 143; SEQ ID NO: 144; SEQ ID NO: 145; SEQ ID NO: 146; SEQ ID NO: 147; SEQ ID NO: 148; SEQ ID NO: 149; SEQ ID NO: 150; SEQ ID NO: 151; SEQ ID NO: 152; SEQ ID NO: 153; SEQ ID NO: 154; SEQ ID NO: 155; SEQ ID NO: 156; SEQ ID NO: 157; SEQ ID NO: 158; SEQ ID NO: 159; SEQ ID NO: 160; SEQ ID NO: 161; SEQ ID NO: 162; SEQ ID NO: 163; SEQ ID NO: 164; SEQ ID NO: 165; SEQ ID NO: 166; SEQ ID NO: 167; SEQ ID NO: 168; SEQ ID NO: 169; SEQ ID NO: 170; SEQ ID NO: 171; SEQ ID NO: 172; SEQ ID NO: 173; SEQ ID NO: 174; SEQ ID NO: 175; SEQ ID NO: 176; SEQ ID NO: 177; SEQ ID NO: 178; SEQ ID NO: 179; SEQ ID NO: 180; SEQ ID NO: 181; SEQ ID NO: 182; SEQ ID NO: 183; SEQ ID NO: 184; SEQ ID NO: 185; and SEQ ID NO: 186.

4. An epithelial cell gene expression profile comprising one or more nucleic acid sequences substantially homologous to a nucleic acid sequence or complementary sequence thereof selected from the group selected from the group consisting of SEQ ID NO: 47; SEQ ID NO: 60; SEQ ID NO: 67; SEQ ID NO: 73; SEQ ID NO: 75; SEQ ID NO: 76; SEQ ID NO: 77; SEQ ID NO: 78; SEQ ID NO: 80; SEQ ID NO: 96; SEQ ID NO: 98; SEQ ID NO: 99; SEQ ID NO: 111; SEQ ID NO: 112; SEQ ID NO: 123; SEQ ID NO: 127; SEQ ID NO: 131; SEQ ID NO: 150; SEQ ID NO: 153; SEQ ID NO: 154; SEQ ID NO: 155; SEQ ID NO: 156; SEQ ID NO: 157; SEQ ID NO: 158; SEQ ID NO: 159; SEQ ID NO: 160; SEQ ID NO: 161; SEQ ID NO: 162; SEQ ID NO: 163; SEQ ID NO: 164; SEQ ID NO: 165; SEQ ID NO: 166; SEQ ID NO: 167; SEQ ID NO: 168; SEQ ID NO: 169; SEQ ID NO: 170; SEQ ID NO: 171; SEQ ID NO: 172; SEQ ID NO: 173; SEQ ID NO: 174; SEQ ID NO: 175; SEQ ID NO: 176; SEQ ID NO: 177; SEQ ID NO: 178; SEQ ID NO: 179; SEQ ID NO: 180; SEQ ID NO: 181; SEQ ID NO: 182; SEQ ID NO: 183; SEQ ID NO: 184; SEQ ID NO: 185; and SEQ ID NO: 186.

5. A keratinocyte epithelial cell gene expression profile comprising one or more nucleic acid sequences substantially homologous to a nucleic acid sequence or complementary sequence thereof selected from the group selected from the group consisting of SEQ ID NO: 187; SEQ ID NO: 188; SEQ ID NO: 189; SEQ ID NO: 190; SEQ ID NO: 191; SEQ ID NO: 192; SEQ ID NO: 193; SEQ ID NO: 194; SEQ ID NO: 195; SEQ ID NO: 196; SEQ ID NO: 197; SEQ ID NO: 198; SEQ ID NO: 199; SEQ ID NO: 200; SEQ ID NO: 201; SEQ ID NO: 202; SEQ ID NO: 203; SEQ ID NO: 204; SEQ ID NO: 205; SEQ ID NO: 206; SEQ ID NO: 207; SEQ ID NO: 208; SEQ ID NO: 209; SEQ ID NO: 210; and SEQ ID NO: 211.

6. A mammary epithelial cell gene expression profile comprising one or more nucleic acid sequences substantially homologous to a nucleic acid sequence or complementary sequence thereof selected from the group selected from the group consisting of SEQ ID NO: 78; SEQ ID NO: 212; SEQ ID NO: 213; SEQ ID NO: 216; SEQ ID NO: 225; SEQ ID NO: 226; SEQ ID NO: 227; SEQ ID NO: 239; SEQ ID NO: 271; SEQ ID NO: 285; and SEQ ID NO: 289.

7. A bronchial epithelial cell gene expression profile comprising one or more nucleic acid sequences substantially homologous to a nucleic acid sequence or complementary sequence thereof selected from the group selected from the group consisting of SEQ ID NO: 27; SEQ ID NO: 131; SEQ ID NO: 150; SEQ ID NO: 169; SEQ ID NO: 214; SEQ ID NO: 215; SEQ ID NO: 223; SEQ ID NO: 224; SEQ ID NO: 241; SEQ ID NO: 243; SEQ ID NO: 244; SEQ ID NO: 255; SEQ ID NO: 256; SEQ ID NO: 261; and SEQ ID NO: 314.

8. A prostate epithelial cell gene expression profile comprising one or more nucleic acid sequences substantially homologous to a nucleic acid sequence or complementary sequence thereof selected from the group selected from the group consisting of SEQ ID NO: 64; SEQ ID NO: 217; SEQ ID NO: 218; SEQ ID NO: 259; SEQ ID NO: 293; SEQ ID NO: 302; and SEQ ID NO: 320.

9. A renal cortical epithelial cell gene expression profile comprising one or more nucleic acid sequences substantially homologous to a nucleic acid sequence or complementary sequence thereof selected from the group selected from the group consisting of SEQ ID NO: 49; SEQ ID NO: 57; SEQ ID NO: 104; SEQ ID NO: 123; SEQ ID NO: 160; SEQ ID NO: 165; SEQ ID NO: 166; SEQ ID NO: 219; SEQ ID NO: 267; SEQ ID NO: 270; SEQ ID NO: 279; SEQ ID NO: 280; SEQ ID NO: 283; SEQ ID NO: 291; SEQ ID NO: 305; SEQ ID NO: 307; SEQ ID NO: 310; SEQ ID NO: 313; SEQ ID NO: 325; SEQ ID NO: 326; and SEQ ID NO: 327.

10. A renal proximal tubule epithelial cell gene expression profile comprising one or more nucleic acid sequences substantially homologous to a nucleic acid sequence or complementary sequence thereof selected from the group selected from the group consisting of SEQ ID NO: 106; SEQ ID NO: 138; SEQ ID NO: 158; SEQ ID NO: 228; SEQ ID NO: 236; SEQ ID NO: 242; SEQ ID NO: 250; SEQ ID NO: 258; SEQ ID NO: 260; SEQ ID NO: 262; SEQ ID NO: 266; SEQ ID NO: 272; SEQ ID NO: 273; SEQ ID NO: 274; SEQ ID NO: 275; SEQ ID NO: 276; SEQ ID NO: 278; SEQ ID NO: 284; SEQ ID NO: 288; SEQ ID NO: 295; SEQ ID NO: 296; SEQ ID NO: 297; SEQ ID NO: 299; SEQ ID NO: 300; SEQ ID NO: 301; SEQ ID NO: 306; SEQ ID NO: 308; SEQ ID NO: 309; SEQ ID NO: 311; SEQ ID NO: 316; SEQ ID NO: 318; SEQ ID NO: 321; SEQ ID NO: 322; SEQ ID NO: 328; and SEQ ID NO: 329.

11. A small airway epithelial cell gene expression profile comprising one or more nucleic acid sequences substantially homologous to a nucleic acid sequence or complementary sequence thereof selected from the group selected from the group consisting of SEQ ID NO: 173; SEQ ID NO: 174; SEQ ID NO: 183; SEQ ID NO: 220; SEQ ID NO: 221; SEQ ID NO: 222; SEQ ID NO: 229; SEQ ID NO: 230; SEQ ID NO: 231; SEQ ID NO: 232; SEQ ID NO: 233; SEQ ID NO: 234; SEQ ID NO: 235; SEQ ID NO: 237; SEQ ID NO: 238; SEQ ID NO: 240; SEQ ID NO: 245; SEQ ID NO: 246; SEQ ID NO: 247; SEQ ID NO: 248; SEQ ID NO: 249; SEQ ID NO: 251; SEQ ID NO: 252; SEQ ID NO: 254; SEQ ID NO: 257; SEQ ID NO: 263; SEQ ID NO: 264; SEQ ID NO: 265; SEQ ID NO: 268; SEQ ID NO: 269; SEQ ID NO: 270; SEQ ID NO: 277; SEQ ID NO: 281; SEQ ID NO: 282; SEQ ID NO: 286; SEQ ID NO: 287; SEQ ID NO: 290; SEQ ID NO: 294; SEQ ID NO: 298; SEQ ID NO: 303; SEQ ID NO: 312; SEQ ID NO: 315; SEQ ID NO: 317; and SEQ ID NO: 319.

12. A renal epithelial cell gene expression profile comprising one or more nucleic acid sequences substantially homologous to a nucleic acid sequence or complementary sequence thereof selected from the group selected from the group consisting of SEQ ID NO: 37; SEQ ID NO: 253; SEQ ID NO: 304; SEQ ID NO: 323; and SEQ ID NO: 324.

13. A gene expression profile comprising one or more genes, wherein said gene expression profile is generated from a cell type selected from the group consisting of coronary artery endothelium, umbilical artery endothelium, umbilical vein endothelium, aortic endothelium, dermal microvascular endothelium, pulmonary artery endothelium, myometrium microvascular endothelium, keratinocyte epithelium, bronchial epithelium, mammary epithelium, prostate epithelium, renal cortical epithelium, renal proximal tubule epithelium, small airway epithelium, renal epithelium, umbilical artery smooth muscle, neonatal dermal fibroblast, pulmonary artery smooth muscle, dermal fibroblast, neural progenitor cells, skeletal muscle, astrocytes, aortic smooth muscle, mesangial cells, coronary artery smooth muscle, bronchial smooth muscle, uterine smooth muscle, lung fibroblast, osteoblasts, and prostate stromal cells.

14. A microarray comprising an endothelial cell gene expression profile comprising one or more nucleic acid sequences substantially homologous to a nucleic acid sequence or complementary sequence thereof, or portions of said nucleic acid sequence or complementary sequence thereof, selected from the group consisting of SEQ ID NO: 1; SEQ ID NO: 2; SEQ ID NO: 3; SEQ ID NO: 4; SEQ ID NO: 5; SEQ ID NO: 6; SEQ ID NO: 7; SEQ ID NO: 8; SEQ ID NO: 9; SEQ ID NO: 10; SEQ ID NO: 11; SEQ ID NO: 12; SEQ ID NO: 13; SEQ ID NO: 14; SEQ ID NO: 15; SEQ ID NO: 16; SEQ ID NO: 17; SEQ ID NO: 18; SEQ ID NO: 19; SEQ ID NO: 20; SEQ ID NO: 21; SEQ ID NO: 22; SEQ ID NO: 23; SEQ ID NO: 48; SEQ ID NO: 63; SEQ ID NO: 70; SEQ ID NO: 82; SEQ ID NO: 94; and SEQ ID NO: 144.

15. A microarray comprising muscle cell gene expression profile comprising one or more nucleic acid sequences substantially homologous to a nucleic acid sequence or complementary sequence thereof, or portions of said nucleic acid sequence or complementary sequence thereof, selected from the group consisting of SEQ ID NO: 24; SEQ ID NO: 25; SEQ ID NO: 26; SEQ ID NO: 27; SEQ ID NO: 28; SEQ ID NO: 29; SEQ ID NO: 30; SEQ ID NO: 31; SEQ ID NO: 32; SEQ ID NO: 33; SEQ ID NO: 34; SEQ ID NO: 35; SEQ ID NO: 36; SEQ ID NO: 37; SEQ ID NO: 39; SEQ ID NO: 40; SEQ ID NO: 41; SEQ ID NO: 42; SEQ ID NO: 54; SEQ ID NO: 55; and SEQ ID NO: 69.

16. A microarray comprising a primary cell gene expression profile comprising one or more nucleic acid sequences substantially homologous to a nucleic acid sequence or complementary sequence thereof, or portions of said nucleic acid sequence or complementary sequence thereof, selected from the group consisting of SEQ ID NO: 1; SEQ ID NO: 2; SEQ ID NO: 3; SEQ ID NO: 4; SEQ ID NO: 5; SEQ ID NO: 6; SEQ ID NO: 7; SEQ ID NO: 8; SEQ ID NO: 9; SEQ ID NO: 10; SEQ ID NO: 1; SEQ ID NO: 12; SEQ ID NO: 13; SEQ ID NO: 14; SEQ ID NO: 15; SEQ ID NO: 16; SEQ ID NO: 17; SEQ ID NO: 18; SEQ ID NO: 19; SEQ ID NO: 20; SEQ ID NO: 21; SEQ ID NO: 22; SEQ ID NO: 23; SEQ ID NO: 24; SEQ ID NO: 25; SEQ ID NO: 26; SEQ ID NO: 27; SEQ ID NO: 28; SEQ ID NO: 29; SEQ ID NO: 30; SEQ ID NO: 31; SEQ ID NO: 32; SEQ ID NO: 33; SEQ ID NO: 34; SEQ ID NO: 35; SEQ ID NO: 36; SEQ ID NO: 37; SEQ ID NO: 39; SEQ ID NO: 40; SEQ ID NO: 41; SEQ ID NO: 42; SEQ ID NO: 43; SEQ ID NO: 44; SEQ ID NO: 45; SEQ ID NO: 46; SEQ ID NO: 47; SEQ ID NO: 48; SEQ ID NO: 49; SEQ ID NO: 50; SEQ ID NO: 51; SEQ ID NO: 52; SEQ ID NO: 53; SEQ ID NO: 54; SEQ ID NO: 55; SEQ ID NO: 56; SEQ ID NO: 57; SEQ ID NO: 58; SEQ ID NO: 59; SEQ ID NO: 60; SEQ ID NO: 61; SEQ ID NO: 62; SEQ ID NO: 63; SEQ ID NO: 64; SEQ ID NO: 65; SEQ ID NO: 66; SEQ ID NO: 67; SEQ ID NO: 68; SEQ ID NO: 69; SEQ ID NO: 70; SEQ ID NO: 71; SEQ ID NO: 72; SEQ ID NO: 73; SEQ ID NO: 74; SEQ ID NO: 75; SEQ ID NO: 76; SEQ ID NO: 77; SEQ ID NO: 78; SEQ ID NO: 79; SEQ ID NO: 80; SEQ ID NO: 81; SEQ ID NO: 82; SEQ ID NO: 83; SEQ ID NO: 84; SEQ ID NO: 85; SEQ ID NO: 86; SEQ ID NO: 87; SEQ ID NO: 88; SEQ ID NO: 89; SEQ ID NO: 90; SEQ ID NO: 91; SEQ ID NO: 92; SEQ ID NO: 93; SEQ ID NO: 94; SEQ ID NO: 95; SEQ ID NO: 96; SEQ ID NO: 97; SEQ ID NO: 98; SEQ ID NO: 99; SEQ ID NO: 100; SEQ ID NO: 101; SEQ ID NO: 102; SEQ ID NO: 103; SEQ ID NO: 104; SEQ ID NO: 105; SEQ ID NO: 106; SEQ ID NO: 107; SEQ ID NO: 108; SEQ ID NO: 109; SEQ ID NO: 110; SEQ ID NO: 111; SEQ ID NO: 112; SEQ ID NO: 113; SEQ ID NO: 114; SEQ ID NO: 115; SEQ ID NO: 116; SEQ ID NO: 118; SEQ ID NO: 119; SEQ ID NO: 120; SEQ ID NO: 121; SEQ ID NO: 122; SEQ ID NO: 123; SEQ ID NO: 124; SEQ ID NO: 125; SEQ ID NO: 126; SEQ ID NO: 127; SEQ ID NO: 128; SEQ ID NO: 129; SEQ ID NO: 130; SEQ ID NO: 131; SEQ ID NO: 132; SEQ ID NO: 133; SEQ ID NO: 134; SEQ ID NO: 135; SEQ ID NO: 136; SEQ ID NO: 137; SEQ ID NO: 138; SEQ ID NO: 139; SEQ ID NO: 140; SEQ ID NO: 141; SEQ ID NO: 142; SEQ ID NO: 143; SEQ ID NO: 144; SEQ ID NO: 145; SEQ ID NO: 146; SEQ ID NO: 147; SEQ ID NO: 148; SEQ ID NO: 149; SEQ ID NO: 150; SEQ ID NO: 151; SEQ ID NO: 152; SEQ ID NO: 153; SEQ ID NO: 154; SEQ ID NO: 155; SEQ ID NO: 156; SEQ ID NO: 157; SEQ ID NO: 158; SEQ ID NO: 159; SEQ ID NO: 160; SEQ ID NO: 161; SEQ ID NO: 162; SEQ ID NO: 163; SEQ ID NO: 164; SEQ ID NO: 165; SEQ ID NO: 166; SEQ ID NO: 167; SEQ ID NO: 168; SEQ ID NO: 169; SEQ ID NO: 170; SEQ ID NO: 171; SEQ ID NO: 172; SEQ ID NO: 173; SEQ ID NO: 174; SEQ ID NO: 175; SEQ ID NO: 176; SEQ ID NO: 177; SEQ ID NO: 178; SEQ ID NO: 179; SEQ ID NO: 180; SEQ ID NO: 181; SEQ ID NO: 182; SEQ ID NO: 183; SEQ ID NO: 184; SEQ ID NO: 185; and SEQ ID NO: 186.

17. A microarray comprising an epithelial cell gene expression profile comprising one or more nucleic acid sequences substantially homologous to a nucleic acid sequence or complementary sequence thereof, or portions of said nucleic acid sequence or complementary sequence thereof, selected from the group consisting of SEQ ID NO: 47; SEQ ID NO: 60; SEQ ID NO: 67; SEQ ID NO: 73; SEQ ID NO: 75; SEQ ID NO: 76; SEQ ID NO: 77; SEQ ID NO: 78; SEQ ID NO: 80; SEQ ID NO: 96; SEQ ID NO: 98; SEQ ID NO: 99; SEQ ID NO: 111; SEQ ID NO: 112; SEQ ID NO: 123; SEQ ID NO: 127; SEQ ID NO: 131; SEQ ID NO: 150; SEQ ID NO: 153; SEQ ID NO: 154; SEQ ID NO: 155; SEQ ID NO: 156; SEQ ID NO: 157; SEQ ID NO: 158; SEQ ID NO: 159; SEQ ID NO: 160; SEQ ID NO: 161; SEQ ID NO: 162; SEQ ID NO: 163; SEQ ID NO: 164; SEQ ID NO: 165; SEQ ID NO: 166; SEQ ID NO: 167; SEQ ID NO: 168; SEQ ID NO: 169; SEQ ID NO: 170; SEQ ID NO: 171; SEQ ID NO: 172; SEQ ID NO: 173; SEQ ID NO: 174; SEQ ID NO: 175; SEQ ID NO: 176; SEQ ID NO: 177; SEQ ID NO: 178; SEQ ID NO: 179; SEQ ID NO: 180; SEQ ID NO: 181; SEQ ID NO: 182; SEQ ID NO: 183; SEQ ID NO: 184; SEQ ID NO: 185; and SEQ ID NO: 186.

18. A microarray comprising a keratinocyte epithelial cell gene expression profile comprising one or more nucleic acid sequences substantially homologous to a nucleic acid sequence or complementary sequence thereof, or portions of said nucleic acid sequence or complementary sequence thereof, selected from the group consisting of SEQ ID NO: 187; SEQ ID NO: 188; SEQ ID NO: 189; SEQ ID NO: 190; SEQ ID NO: 191; SEQ ID NO: 192; SEQ ID NO: 193; SEQ ID NO: 194; SEQ ID NO: 195; SEQ ID NO: 196; SEQ ID NO: 197; SEQ ID NO: 198; SEQ ID NO: 199; SEQ ID NO: 200; SEQ ID NO: 201; SEQ ID NO: 202; SEQ ID NO: 203; SEQ ID NO: 204; SEQ ID NO: 205; SEQ ID NO: 206; SEQ ID NO: 207; SEQ ID NO: 208; SEQ ID NO: 209; SEQ ID NO: 210; and SEQ ID NO: 211.

19. A microarray comprising a mammary epithelial cell gene expression profile comprising one or more nucleic acid sequences substantially homologous to a nucleic acid sequence or complementary sequence thereof, or portions of said nucleic acid sequence or complementary sequence thereof, selected from the group consisting of SEQ ID NO: 78; SEQ ID NO: 212; SEQ ID NO: 213; SEQ ID NO: 216; SEQ ID NO: 225; SEQ ID NO: 226; SEQ ID NO: 227; SEQ ID NO: 239; SEQ ID NO: 271; SEQ ID NO: 285; and SEQ ID NO: 289.

20. A microarray comprising a bronchial epithelial cell gene expression profile comprising one or more nucleic acid sequences substantially homologous to a nucleic acid sequence or complementary sequence thereof, or portions of said nucleic acid sequence or complementary sequence thereof, selected from the group consisting of SEQ ID NO: 27; SEQ ID NO: 131; SEQ ID NO: 150; SEQ ID NO: 169; SEQ ID NO: 214; SEQ ID NO: 215; SEQ ID NO: 223; SEQ ID NO: 224; SEQ ID NO: 241; SEQ ID NO: 243; SEQ ID NO: 244; SEQ ID NO: 255; SEQ ID NO: 256; SEQ ID NO: 261; and SEQ ID NO: 314.

21. A microarray comprising a prostate epithelial cell gene expression profile comprising one or more nucleic acid sequences substantially homologous to a nucleic acid sequence or complementary sequence thereof, or portions of said nucleic acid sequence or complementary sequence thereof, selected from the group consisting of SEQ ID NO: 64; SEQ ID NO: 217; SEQ ID NO: 218; SEQ ID NO: 259; SEQ ID NO: 293; SEQ ID NO: 302; and SEQ ID NO: 320.

22. A microarray comprising a renal cortical epithelial cell gene expression profile comprising one or more nucleic acid sequences substantially homologous to a nucleic acid sequence or complementary sequence thereof, or portions of said nucleic acid sequence or complementary sequence thereof, selected from the group consisting of SEQ ID NO: 49; SEQ ID NO: 57; SEQ ID NO: 104; SEQ ID NO: 123; SEQ ID NO: 160; SEQ ID NO: 165; SEQ ID NO: 166; SEQ ID NO: 219; SEQ ID NO: 267; SEQ ID NO: 270; SEQ ID NO: 279; SEQ ID NO: 280; SEQ ID NO: 283; SEQ ID NO: 291; SEQ ID NO: 305; SEQ ID NO: 307; SEQ ID NO: 310; SEQ ID NO: 313; SEQ ID NO: 325; SEQ ID NO: 326; and SEQ ID NO: 327.

23. A microarray comprising renal proximal tubule epithelial cell gene expression profile comprising one or more nucleic acid sequences substantially homologous to a nucleic acid sequence or complementary sequence thereof, or portions of said nucleic acid sequence or complementary sequence thereof, selected from the group consisting of SEQ ID NO: 106; SEQ ID NO: 138; SEQ ID NO: 158; SEQ ID NO: 228; SEQ ID NO: 236; SEQ ID NO: 242; SEQ ID NO: 250; SEQ ID NO: 258; SEQ ID NO: 260; SEQ ID NO: 262; SEQ ID NO: 266; SEQ ID NO: 272; SEQ ID NO: 273; SEQ ID NO: 274; SEQ ID NO: 275; SEQ ID NO: 276; SEQ ID NO: 278; SEQ ID NO: 284; SEQ ID NO: 288; SEQ ID NO: 295; SEQ ID NO: 296; SEQ ID NO: 297; SEQ ID NO: 299; SEQ ID NO: 300; SEQ ID NO: 301; SEQ ID NO: 306; SEQ ID NO: 308; SEQ ID NO: 309; SEQ ID NO: 311; SEQ ID NO: 316; SEQ ID NO: 318; SEQ ID NO: 321; SEQ ID NO: 322; SEQ ID NO: 328; and SEQ ID NO: 329.

24. A microarray comprising a small airway epithelial cell gene expression profile comprising one or more nucleic acid sequences substantially homologous to a nucleic acid sequence or complementary sequence thereof, or portions of said nucleic acid sequence or complementary sequence thereof, selected from the group consisting of SEQ ID NO: 173; SEQ ID NO: 174; SEQ ID NO: 183; SEQ ID NO: 220; SEQ ID NO: 221; SEQ ID NO: 222; SEQ ID NO: 229; SEQ ID NO: 230; SEQ ID NO: 231; SEQ ID NO: 232; SEQ ID NO: 233; SEQ ID NO: 234; SEQ ID NO: 235; SEQ ID NO: 237; SEQ ID NO: 238; SEQ ID NO: 240; SEQ ID NO: 245; SEQ ID NO: 246; SEQ ID NO: 247; SEQ ID NO: 248; SEQ ID NO: 249; SEQ ID NO: 251; SEQ ID NO: 252; SEQ ID NO: 254; SEQ ID NO: 257; SEQ ID NO: 263; SEQ ID NO: 264; SEQ ID NO: 265; SEQ ID NO: 268; SEQ ID NO: 269; SEQ ID NO: 270; SEQ ID NO: 277; SEQ ID NO: 281; SEQ ID NO: 282; SEQ ID NO: 286; SEQ ID NO: 287; SEQ ID NO: 290; SEQ ID NO: 294; SEQ ID NO: 298; SEQ ID NO: 303; SEQ ID NO: 312; SEQ ID NO: 315; SEQ ID NO: 317; and SEQ ID NO: 319.

25. A microarray comprising a renal epithelial cell gene expression profile comprising one or more nucleic acid sequences substantially homologous to a nucleic acid sequence or complementary sequence thereof, or portions of said nucleic acid sequence or complementary sequence thereof, selected from the group consisting of SEQ ID NO: 37; SEQ ID NO: 253; SEQ ID NO: 304; SEQ ID NO: 323; and SEQ ID NO: 324.

26. A microarray comprising one or more nucleic acid sequences substantially homologous to a nucleic acid sequence or complementary sequence thereof, or portions of said nucleic acid sequence or complementary sequence thereof, selected from the group consisting of SEQ ID NO: 27; SEQ ID NO: 37; SEQ ID NO: 49; SEQ ID NO: 57; SEQ ID NO: 64; SEQ ID NO: 70; SEQ ID NO: 78; SEQ ID NO: 104; SEQ ID NO: 106; SEQ ID NO: 123; SEQ ID NO: 131; SEQ ID NO: 138; SEQ ID NO: 150; SEQ ID NO: 158; SEQ ID NO: 160; SEQ ID NO: 165; SEQ ID NO: 166; SEQ ID NO: 169; SEQ ID NO: 173; SEQ ID NO: 174; SEQ ID NO: 183; SEQ ID NO: 187; SEQ ID NO: 188; SEQ ID NO: 189; SEQ ID NO: 190; SEQ ID NO: 191; SEQ ID NO: 192; SEQ ID NO: 193; SEQ ID NO: 194; SEQ ID NO: 195; SEQ ID NO: 196; SEQ ID NO: 197; SEQ ID NO: 198; SEQ ID NO: 199; SEQ ID NO: 200; SEQ ID NO: 201; SEQ ID NO: 202; SEQ ID NO: 203; SEQ ID NO: 204; SEQ ID NO: 205; SEQ ID NO: 206; SEQ ID NO: 207; SEQ ID NO: 208; SEQ ID NO: 209; SEQ ID NO: 210; SEQ ID NO: 211; SEQ ID NO: 212; SEQ ID NO: 213; SEQ ID NO: 214; SEQ ID NO: 215; SEQ ID NO: 216; SEQ ID NO: 217; SEQ ID NO: 218; SEQ ID NO: 219; SEQ ID NO: 220; SEQ ID NO: 221; SEQ ID NO: 222; SEQ ID NO: 223; SEQ ID NO: 224; SEQ ID NO: 225; SEQ ID NO: 226; SEQ ID NO: 227; SEQ ID NO: 228; SEQ ID NO: 229; SEQ ID NO: 230; SEQ ID NO: 231; SEQ ID NO: 232; SEQ ID NO: 233; SEQ ID NO: 234; SEQ ID NO: 235; SEQ ID NO: 236; SEQ ID NO: 237; SEQ ID NO: 238; SEQ ID NO: 239; SEQ ID NO: 240; SEQ ID NO: 241; SEQ ID NO: 242; SEQ ID NO: 243; SEQ ID NO: 244; SEQ ID NO: 245; SEQ ID NO: 246; SEQ ID NO: 247; SEQ ID NO: 248; SEQ ID NO: 249; SEQ ID NO: 250; SEQ ID NO: 251; SEQ ID NO: 252; SEQ ID NO: 253; SEQ ID NO: 254; SEQ ID NO: 255; SEQ ID NO: 256; SEQ ID NO: 257; SEQ ID NO: 258; SEQ ID NO: 259; SEQ ID NO: 260; SEQ ID NO: 261; SEQ ID NO: 262; SEQ ID NO: 263; SEQ ID NO: 264; SEQ ID NO: 265; SEQ ID NO: 266; SEQ ID NO: 267; SEQ ID NO: 268; SEQ ID NO: 269; SEQ ID NO: 270; SEQ ID NO: 271; SEQ ID NO: 272; SEQ ID NO: 273; SEQ ID NO: 274; SEQ ID NO: 275; SEQ ID NO: 276; SEQ ID NO: 277; SEQ ID NO: 278; SEQ ID NO: 279; SEQ ID NO: 280; SEQ ID NO: 281; SEQ ID NO: 282; SEQ ID NO: 283; SEQ ID NO: 284; SEQ ID NO: 285; SEQ ID NO: 286; SEQ ID NO: 287; SEQ ID NO: 288; SEQ ID NO: 289; SEQ ID NO: 290; SEQ ID NO: 291; SEQ ID NO: 293; SEQ ID NO: 294; SEQ ID NO: 295; SEQ ID NO: 296; SEQ ID NO: 297; SEQ ID NO: 298; SEQ ID NO: 299; SEQ ID NO: 300; SEQ ID NO: 301; SEQ ID NO: 302; SEQ ID NO: 303; SEQ ID NO: 304; SEQ ID NO: 305; SEQ ID NO: 306; SEQ ID NO: 307; SEQ ID NO: 308; SEQ ID NO: 309; SEQ ID NO: 310; SEQ ID NO: 311; SEQ ID NO: 312; SEQ ID NO: 313; SEQ ID NO: 314; SEQ ID NO: 315; SEQ ID NO: 316; SEQ ID NO: 317; SEQ ID NO: 318; SEQ ID NO: 320; SEQ ID NO: 321; SEQ ID NO: 322; SEQ ID NO: 323; SEQ ID NO: 324; SEQ ID NO: 325; SEQ ID NO: 326; SEQ ID NO: 327; SEQ ID NO: 328; and SEQ ID NO: 329.

27. A microarray comprising a gene expression profile comprising one or more genes or oligonucleotide probes obtained therefrom, wherein said gene expression profile is generated from a cell type selected from the group comprising coronary artery endothelium, umbilical artery endothelium, umbilical vein endothelium, aortic endothelium, dermal microvascular endothelium, pulmonary artery endothelium, myometrium microvascular endothelium, keratinocyte epithelium, bronchial epithelium, mammary epithelium, prostate epithelium, renal cortical epithelium, renal proximal tubule epithelium, small airway epithelium, renal epithelium, umbilical artery smooth muscle, neonatal dermal fibroblast, pulmonary artery smooth muscle, dermal fibroblast, neural progenitor cells, skeletal muscle, astrocytes, aortic smooth muscle, mesangial cells, coronary artery smooth muscle, bronchial smooth muscle, uterine smooth muscle, lung fibroblast, osteoblasts, and prostate stromal cells.

28. A method of determining the level of RNA expression for a sample comprising the steps of:
determining the level of RNA expression for an RNA sample, wherein said RNA sample is amplified, fluorescently labeled, and hybridized to a microarray containing a plurality of nucleic acid sequences, and wherein said microarray is scanned for fluorescence;
normalizing said expression level using an algorithm; and
scoring said RNA sample against a gene expression profile database.

29. The method of claim 28, wherein said RNA sample is obtained from a patient.

30. The method of claim 29, wherein said RNA sample is selected from the group consisting of blood, urine, amniotic fluid, plasma, semen, bone marrow, and tissue biopsy.

31. The method of claim 28, wherein said algorithm is the MaxCor algorithm.

32. The method of claim 28, wherein said algorithm is the Mean Log Ratio algorithm.

33. A method for constructing a gene expression profile comprising the steps of:
hybridizing prepared RNA samples to at least one microarray containing a plurality of nucleic acid sequences representing human genes;
obtaining an expression level for each of said plurality of nucleic acid sequences representing human genes on each of said at least one microarrays; and
normalizing said expression level for each of said plurality of nucleic acid sequences representing human genes on each of said at least one microarrays to control standards.

34. The method of claim 33 further comprising the steps of:
applying an algorithm to each of said normalized gene expression levels;
performing a correlation analysis for all of said normalized gene expression microarrays within a group of samples;
establishing a gene expression profile; and
validating the gene expression profile.

35. The method of claim 34, wherein said algorithm is the MaxCor algorithm.

36. The method of claim 35, wherein applying said MaxCor algorithm to each of said normalized gene expression levels assigns a numeric value to each gene represented on said at least one microarray based upon expression level.

37. The method of claim 36, wherein said numeric value is a number between the range of (−1, +1).

38. The method of claim 37, wherein a negative value of said numeric value represents a gene with relatively lower expression.

39. The method of clam 37, wherein a zero value of said numeric value represents no relative gene expression difference.

40. The method of claim 37, wherein a positive value of said numeric value represents a gene with relatively higher expression.

41. The method of claim 36, wherein said numeric value is a number between the range of (−2, +2).

42. The method of claim 41, wherein a negative value of said numeric value represents a gene with relatively lower expression.

43. The method of clam 41, wherein a zero value of said numeric value represents no relative gene expression difference.

44. The method of claim 41, wherein a positive value of said numeric value represents a gene with relatively higher expression.

45. The method of claim 34, wherein said algorithm is the Mean Log Ratio algorithm.

46. The method of claim 45, wherein applying said Mean Log Ratio algorithm to each of said gene expression microarrays assigns a numeric value to each gene contained on said microarray based upon expression level.

47. The method of claim 46, wherein said numeric value is between the range of (−1, +1).

48. The method of claim 47, wherein a negative value of said numeric value represents a gene with relatively lower expression.

49. The method of claim 47, wherein a zero value of said numeric value represents no relative gene expression difference.

50. The method of claim 47, wherein a positive value of said numeric value represents a gene with relatively higher expression.

51. The method of claim 46, wherein said numeric value is a number between the range of (−2, +2).

52. The method of claim 51, wherein a negative value of said numeric value represents a gene with relatively lower expression.

53. The method of clam 51, wherein a zero value of said numeric value represents no relative gene expression difference.

54. The method of claim 51, wherein a positive value of said numeric value represents a gene with relatively higher expression.

55. A method, in a computer system, for constructing and analyzing a gene expression profile comprising the steps of:
inputting gene expression data for each of a plurality of genes;
normalizing expression data by transforming said data into log ratio values;
filtering weak differential values;
applying an algorithm to each of said normalized gene expression values;
performing a classification analysis for all of said normalized gene expression values;
establishing a gene expression profile; and
validating the gene expression profile.

56. The method of claim 55, wherein said algorithm is the MaxCor algorithm.

57. The method of claim 55, wherein said algorithm is the Mean Log Ratio algorithm.

58. A computer program for constructing and analyzing a gene expression profile comprising:
computer code that receives as input gene expression data for a plurality of genes;
computer code that normalizes expression data by transforming said data into log ratio values;
computer code that applies an algorithm to each of said normalized gene expression values;
computer code that performs a correlation analysis for all of said normalized gene expression values;
computer code that establishes and validates the gene expression profile; and
computer readable medium that stores computer code.

59. The computer program of claim 58, wherein said algorithm is the MaxCor algorithm.

60. The computer program of claim 58, wherein said algorithm is the Mean Log Ratio algorithm.

61. A method for determining the phenotype of a cell comprising the steps of
applying an algorithm to extract a gene expression profile from gene expression data generated from said cell; and
matching said gene expression profile to a gene expression profile generated from a cell of known phenotype.

62. The method of claim 61, wherein said algorithm is the MaxCor algorithm.

63. The method of claim 61, wherein said algorithm is the Mean Log Ratio algorithm.

64. The method of claim 61, wherein said applying step comprises setting a cutoff value for expression relative to normalized values, wherein said cutoff value is at least about two-fold induction above the normalized values.

65. The method of claim 61, wherein said matching step is performed using a database comprising one or more gene expression profiles generated from cells of known phenotype.

66. A method for distinguishing cell types comprising the step of matching a gene expression profile generated from a biological sample using an algorithm to a known gene expression profile of a specific cell type.

67. The method of claim 66, wherein said algorithm is the MaxCor algorithm.

68. The method of claim 66, wherein said algorithm is the Mean Log Ratio algorithm.

69. The method of claim 66, wherein said specific cell type is selected from the group consisting of coronary artery endothelium, umbilical artery endothelium, umbilical vein endothelium, aortic endothelium, dermal microvascular endothelium, pulmonary artery endothelium, myometrium microvascular endothelium, keratinocyte epithelium, bronchial epithelium, mammary epithelium, prostate epithelium, renal cortical epithelium, renal proximal tubule epithelium, small airway epithelium, renal epithelium, umbilical artery smooth muscle, neonatal dermal fibroblast, pulmonary artery smooth muscle, dermal fibroblast, neural progenitor cells, skeletal muscle, astrocytes, aortic smooth muscle, mesangial cells, coronary artery smooth muscle, bronchial smooth muscle, uterine smooth muscle, lung fibroblast, osteoblasts, and prostate stromal cells.

70. A microarray comprising one or more protein-capture agents that specifically bind to all or a portion of one or more of the proteins encoded by the genes comprising the gene expression profile of claim 1.

71. A microarray comprising one or more protein-capture agents that specifically bind to all or a portion of one or more of the proteins encoded by the genes comprising the gene expression profile of claim 2.

72. A microarray comprising one or more protein-capture agents that specifically bind to all or a portion of one or more of the proteins encoded by the genes comprising the gene expression profile of claim 3.

73. A microarray comprising one or more protein-capture agents that specifically bind to all or a portion of one or more of the proteins encoded by the genes comprising the gene expression profile of claim 4

74. A microarray comprising one or more protein-capture agents that specifically bind to all or a portion of one or more of the proteins encoded by the genes comprising the gene expression profile of claim 5.

75. A microarray comprising one or more protein-capture agents that specifically bind to all or a portion of one or more of the proteins encoded by the genes comprising the gene expression profile of claim 6.

76. A microarray comprising one or more protein-capture agents that specifically bind to all or a portion of one or more of the proteins encoded by the genes comprising the gene expression profile of claim 7.

77. A microarray comprising one or more protein-capture agents that specifically bind to all or a portion of one or more of the proteins encoded by the genes comprising the gene expression profile of claim 8.

78. A microarray comprising one or more protein-capture agents that specifically bind to all or a portion of one or more of the proteins encoded by the genes comprising the gene expression profile of claim 9.

79. A microarray comprising one or more protein-capture agents that specifically bind to all or a portion of one or more of the proteins encoded by the genes comprising the gene expression profile of claim 10.

80. A microarray comprising one or more protein-capture agents that specifically bind to all or a portion of one or more of the proteins encoded by the genes comprising the gene expression profile of claim 11.

81. A microarray comprising one or more protein-capture agents that specifically bind to all or a portion of one or more of the proteins encoded by the genes comprising the gene expression profile of claim 12.

82. A method for determining the phenotype of a cell comprising the steps of
applying an algorithm to extract a protein expression profile from protein expression data generated from said cell; and
matching said protein expression profile to a protein expression profile generated from a cell of known phenotype.

83. The method of claim 82, wherein said algorithm is the MaxCor algorithm.

84. The method of claim 82, wherein said algorithm is the Mean Log Ratio algorithm.

85. The method of claim 82, wherein said applying step comprises setting a cutoff value for expression relative to normalized values, wherein said cutoff value is at least about two-fold induction above the normalized values.

86. The method of claim 82, wherein said matching step is performed using a database comprising one or more protein expression profiles generated from cells of known phenotype.

87. A method for distinguishing cell types comprising the step of matching a protein expression profile generated from a biological sample using an algorithm to a known protein expression profile of a specific cell type.

88. The method of claim 87, wherein said algorithm is the MaxCor algorithm.

89. The method of claim 87, wherein said algorithm is the Mean Log Ratio algorithm.

90. The method of claim 87, wherein said specific cell type is selected from the group consisting of coronary artery endothelium, umbilical artery endothelium, umbilical vein endothelium, aortic endothelium, dermal microvascular endothelium, pulmonary artery endothelium, myometrium microvascular endothelium, keratinocyte epithelium, bronchial epithelium, mammary epithelium, prostate epithelium, renal cortical epithelium, renal proximal tubule epithelium, small airway epithelium, renal epithelium, umbilical artery smooth muscle, neonatal dermal fibroblast, pulmonary artery smooth muscle, dermal fibroblast, neural progenitor cells, skeletal muscle, astrocytes, aortic smooth muscle, mesangial cells, coronary artery smooth muscle, bronchial smooth muscle, uterine smooth muscle, lung fibroblast, osteoblasts, and prostate stromal cells.

The application's sequence listing, which the Patent Office published only in electronic form, follows.

SEQUENCE LISTING (805 sequences)

SEQ ID NO: 1 - DNA, 1041 bp, Homo sapiens
ctaaagatctccctccaggcagcccttggctggtccctgcgagcccgtggagactgccagagatgtcctctttcggttacaggaccctgactgtggccctcttcaccctgatctgctgtccaggatcggatgagaaggtattcgaggtacacgtgaggccaaagaagctggcggttgagcccaaagggtccctcgaggtcaactgcagcaccacctgtaaccagcctgaagtgggtggtctggagacctctctaaataagattctgctggacgaacaggctcagtggaaacattacttggtctcaaacatctcccatgacacggtcctccaatgccacttcacctgctccgggaagcaggagtcaatgaattccaacgtcagcgtgtaccagcctccaaggcaggtcatcctgacactgcaacccactttggtggctgtgggcaagtccttcaccattgagtgcagggtgcccaccgtggagcccctggacagcctcaccctcttcctgttccgtggcaatgagactctgcactatgagaccttcgggaaggcagcccctgctccgcaggaggccacagccacattcaacagcacggctgacagagaggatggccaccgcaacttctcctgcctggctgtgctggacttgatgtctcgcggtggcaacatctttcacaaacactcagccccgaagatgttggagatctatgagcctgtgtcggacagccagatggtcatcatagtcacggtggtgtcggtgttgctgtccctgttcgtgacatctgtcctgctctgcttcatcttcggccagcacttgcgccagcagcggatgggcacctacggggtgcgagcggcttggaggaggctgccccaggccttccggccatagcaaccatgagtggcatggccaccaccacggtggtcactggaactcagtgtgactcctcagggttgaggtccagccctggctgaaggactgtgacaggcagcagagacttgggacattgccttttctagcccgaatacaaacacctggactt

SEQ ID NO: 2 - DNA, 349 bp, Homo sapiens
  modified_base (62): a, t, c, g, other or unknown
  modified_base (146): a, t, c, g, other or unknown
  modified_base (148): a, t, c, g, other or unknown
  modified_base (169): a, t, c, g, other or unknown
  modified_base (176): a, t, c, g, other or unknown
  modified_base (180): a, t, c, g, other or unknown
  modified_base (200): a, t, c, g, other or unknown
  modified_base (203): a, t, c, g, other or unknown
  modified_base (244): a, t, c, g, other or unknown
  modified_base (299): a, t, c, g, other or unknown
  modified_base (304): a, t, c, g, other or unknown
  modified_base (313): a, t, c, g, other or unknown
  modified_base (328): a, t, c, g, other or unknown
tttttgcaaagagcaaaggtcaaatttatttaatacaacatccacgagggtccctgcagctntgtcactgaggcaaacaggaaaagtgattttggctaggcgtggttctcatctgtgaaattccacagcgcaatgacagcagcctntntcccacccactcaagacactntcaggantgtnttaagacctcaggagaccanttntttagcaagcaattttgttttttgttttttttgagatgggnttctcactctgtcactcaggctgggagtgcagtggcgcgatctcccgctcactanaaccnccgtttccnggggggtcaaggggntaatttcacctcaggcccttg

SEQ ID NO: 3 - DNA, 8575 bp, Homo sapiens
gcagctgagagcatggcctagggtgggcggcaccattgtccagcagctgagtttcccagggaccttggagatagccgcagccctcatttgcaggggaagatgattcctgccagatttgccggggtgctgcttgctctggccctcattttgccagggaccctttgtgcagaaggaactcgcggcaggtcatccacggcccgatgcagccttttcggaagtgacttcgtcaacacctttgatgggagcatgtacagctttgcgggatactgcagttacctcctggcagggggctgccagaaacgctccttctcgattattggggacttccagaatggcaagagagtgagcctctccgtgtatcttggggaattttttgacatccatttgtttgtcaatggtaccgtgacacagggggaccaaagagtctccatgccctatgcctccaaagggctgtatctagaaactgaggctgggtactacaagctgtccggtgaggcctatggctttgtggccaggatcgatggcagcggcaactttcaagtcctgctgtcagacagatacttcaacaagacctgcgggctgtgtggcaactttaacatctttgctgaagatgactttatgacccaagaagggaccttgacctcggacccttatgactttgccaactcatgggctctgagcagtggagaacagtggtgtgaacgggcatctcctcccagcagctcatgcaacatctcctctggggaaatgcagaagggcctgtgggagcagtgccagcttctgaagagcacctcggtgtttgcccgctgccaccctctggtggaccccgagccttttgtggccctgtgtgagaagactttgtgtgagtgtgctggggggctggagtgcgcctgccctgccctcctggagtacgcccggacctgtgcccaggagggaatggtgctgtacggctggaccgaccacagcgcgtgcagcccagtgtgccctgctggtatggagtataggcagtgtgtgtccccttgcgccaggacctgccagagcctgcacatcaatgaaatgtgtcaggagcgatgcgtggatggctgcagctgccctgagggacagctcctggatgaaggcctctgcgtggagagcaccgagtgtccctgcgtgcattccggaaagcgctaccctcccggcacctccctctctcgagactgcaacacctgcatttgccgaaacagccagtggatctgcagcaatgaagaatgtccaggggagtgccttgtcacaggtcaatcacacttcaagagctttgacaacagatacttcaccttcagtgggatctgccagtacctgctggcccgggattgccaggaccactccttctccattgtcattgagactgtccagtgtgctgatgaccgcgacgctgtgtgcacccgctccgtcaccgtccggctgcctggcctgcacaacagccttgtgaaactgaagcatggggcaggagttgccatggatggccaggacgtccagctccccctcctgaaaggtgacctccgcatccagcatacagtgacggcctccgtgcgcctcagctacggggaggacctgcagatggactgggatggccgcgggaggctgctggtgaagctgtcccccgtctatgccgggaagacctgcggcctgtgtgggaattacaatggcaaccagggcgacgacttccttaccccctctgggctggcggagccccgggtggaggacttcgggaacgcctggaagctgcacggggactgccaggacctgcagaagcagcacagcgatccctgcgccctcaacccgcgcatgaccaggttctccgaggaggcgtgcgcggtcctgacgtcccccacattcgaggcctgccatcgtgccgtcagcccgctgccctacctgcggaactgccgctacgacgtgtgctcctgctcggacggccgcgagtgcctgtgcggcgccctggccagctatgccgcggcctgcgcggggagaggcgtgcgcgtcgcgtggcgcgagccaggccgctgtgagctgaactgcccgaaaggccaggtgtacctgcagtgcgggaccccctgcaacctgacctgccgctctctctcttacccggatgaggaatgcaatgaggcctgcctggagggctgcttctgccccccagggctctacatggatgagaggggggactgcgtgcccaaggcccagtgcccctgttactatgacggtgagatcttccagccagaagacatcttctcagaccatcacaccatgtgctactgtgaggatggcttcatgcactgtaccatgagtggagtccccggaagcttgctgcctgacgctgtcctcagcagtcccctgtctcatcgcagcaaaaggagcctatcctgtcggccccccatggtcaagctggtgtgtcccgctgacaacctgcgggctgaagggctcgagtgtaccaaaacgtgccagaactatgacctggagtgcatgagcatgggctgtgtctctggctgcctctgccccccgggcatggtccggcatgagaacagatgtgtggccctggaaaggtgtccctgcttccatcagggcaaggagtatgcccctggagaaacagtgaagattggctgcaacacttgtgtctgtcgggaccggaagtggaactgcacagaccatgtgtgtgatgccacgtgctccacgatcggcatggcccactacctcaccttcgacgggctcaaatacctgttccccggggagtgccagtacgttctggtgcaggattactgcggcagtaaccctgggacctttcggatcctagtggggaataagggatgcagccacccctcagtgaaatgcaagaaacgggtcaccatcctggtggagggaggagagattgagctgtttgacggggaggtgaatgtgaagaggcccatgaaggatgagactcactttgaggtggtggagtctggccggtacatcattctgctgctgggcaaagccctctccgtggtctgggaccgccacctgagcatctccgtggtcctgaagcagacataccaggagaaagtgtgtggcctgtgtgggaattttgatggcatccagaacaatgacctcaccagcagcaacctccaagtggaggaagaccctgtggactttgggaactcctggaaagtgagctcgcagtgtgctgacaccagaaaagtgcctctggactcatcccctgccacctgccataacaacatcatgaagcagacgatggtggattcctcctgtagaatccttaccagtgacgtcttccaggactgcaacaagctggtggaccccgagccatatctggatgtctgcatttacgacacctgctcctgtgagtccattggggactgcgcctgcttctgcgacaccattgctgcctatgcccacgtgtgtgcccagcatggcaaggtggtgacctggaggacggccacattgtgcccccagagctgcgaggagaggaatctccgggagaacgggtatgagtgtgagtggcgctataacagctgtgcacctgcctgtcaagtcacgtgtcagcaccctgagccactggcctgccctgtgcagtgtgtggagggctgccatgcccactgccctccagggaaaatcctggatgagcttttgcagacctgcgttgaccctgaagactgtccagtgtgtgaggtggctggccggcgttttgcctcaggaaagaaagtcaccttgaatcccagtgaccctgagcactgccagatttgccactgtgatgttgtcaacctcacctgtgaagcctgccaggagccgggaggcctggtggtgcctcccacagatgccccggtgagccccaccactctgtatgtggaggacatctcggaaccgccgttgcacgatttctactgcagcaggctactggacctggtcttcctgctggatggctcctccaggctgtccgaggctgagtttgaagtgctgaaggcctttgtggtggacatgatggagcggctgcgcatctcccagaagtgggtccgcgtggccgtggtggagtaccacgacggctcccacgcctacatcgggctcaaggaccggaagcgaccgtcagagctgcggcgcattgccagccaggtgaagtatgcgggcagccaggtggcctccaccagcgaggtcttgaaatacacactgttccaaatcttcagcaagatcgaccgccctgaagcctcccgcatcgccctgctcctgatggccagccaggagccccaacggatgtcccggaactttgtccgctacgtccagggcctgaagaagaagaaggtcattgtgatcccggtgggcattgggccccatgccaacctcaagcagatccgcctcatcgagaagcaggcccctgagaacaaggccttcgtgctgagcagtgtggatgagctggagcagcaaagggacgagatcgttagctacctctgtgaccttgcccctgaagcccctcctcctactctgcccccccacatggcacaagtcactgtgggcccggggctcttgggggtttcgaccctggggcccaagaggaactccatggttctggatgtggcgttcgtcctggaaggatcggacaaaattggtgaagccgacttcaacaggagcaaggagttcatggaggaggtgattcagcggatggatgtgggccaggacagcatccacgtcacggtgctgcagtactcctacatggtgaccgtggagtaccccttcagcgaggcacagtccaaaggggacatcctgcagcgggtgcgagagatccgctaccagggcggcaacaggaccaacactgggctggccctgcggtacctctctgaccacagcttcttggtcagccagggtgaccgggagcaggcgcccaacctggtctacatggtcaccggaaatcctgcctctgatgagatcaagaggctgcctggagacatccaggtggtgcccattggagtgggccctaatgccaacgtgcaggagctggagaggattggctggcccaatgcccctatcctcatccaggactttgagacgctcccccgagaggctcctgacctggtgctgcagaggtgctgctccggagaggggctgcagatccccaccctctcccctgcacctgactgcagccagcccctggacgtgatccttctcctggatggctcctccagtttcccagcttcttattttgatgaaatgaagagtttcgccaaggctttcatttcaaaagccaatatagggcctcgtctcactcaggtgtcagtgctgcagtatggaagcatcaccaccattgacgtgccatggaacgtggtcccggagaaagcccatttgctgagccttgtggacgtcatgcagcgggagggaggccccagccaaatcggggatgccttgggctttgctgtgcgatacttgacttcagaaatgcatggtgccaggccgggagcctcaaaggcggtggtcatcctggtcacggacgtctctgtggattcagtggatgcagcagctgatgccgccaggtccaacagagtgacagtgttccctattggaattggagatcgctacgatgcagcccagctacggatcttggcaggcccagcaggcgactccaacgtggtgaagctccagcgaatcgaagacctccctaccatggtcaccttgggcaattccttcctccacaaactgtgctctggatttgttaggatttgcatggatgaggatgggaatgagaagaggcccggggacgtctggaccttgccagaccagtgccacaccgtgacttgccagccagatggccagaccttgctgaagactcatcgggtcaactgtgaccgggggctgaggccttcgtgccctaacagccagtcccctgttaaagtggaagagacctgtggctgccgctggacctgcccctgcgtgtgcacaggcagctccactcggcacatcgtgacctttgatgggcagaatttcaagctgactggcagctgttcttatgtcctatttcaaaacaaggagcaggacctggaggtgattctccataatggtgcctgcagccctggagcaaggcagggctgcatgaaatccatcgaggtgaagcacagtgccctctccgtcgagctgcacagtgacatggaggtgacggtgaatgggagactggtctctgttccttacgtgggtgggaacatggaagtcaacgtttatggtgccatcatgcatgaggtcagattcaatcaccttggtcacatcttcacattcactccacaaaacaatgagttccaactgcagctcagccccaagacttttgcttcaaagacgtatggtctgtgtgggatctgtgatgagaacggagccaatgacttcatgctgagggatggcacagtcaccacagactggaaaacacttgttcaggaatggactgtgcagcggccagggcagacgtgccagcccatcctggaggagcagtgtcttgtccccgacagctcccactgccaggtcctcctcttaccactgtttgctgaatgccacaaggtcctggctccagccacattctatgccatctgccagcaggacagttgccaccaggagcaagtgtgtgaggtgatcgcctcttatgcccacctctgtcggaccaacggggtctgcgttgactggaggacacctgatttctgtgctatgtcatgcccaccatctctggtctacaaccactgtgagcatggctgtccccggcactgtgatggcaacgtgagctcctgtggggaccatccctccgaaggctgtttctgccctccagataaagtcatgttggaaggcagctgtgtccctgaagaggcctgcactcagtgcattggtgaggatggagtccagcaccagttcctggaagcctgggtcccggaccaccagccctgtcagatctgcacatgcctcagcgggcggaaggtcaactgcacaacgcagccctgccccacggccaaagctcccacgtgtggcctgtgtgaagtagcccgcctccgccagaatgcagaccagtgctgccccgagtatgagtgtgtgtgtgacccagtgagctgtgacctgcccccagtgcctcactgtgaacgtggcctccagcccacactgaccaaccctggcgagtgcagacccaacttcacctgcgcctgcaggaaggaggagtgcaaaagagtgtccccaccctcctgccccccgcaccgtttgcccacccttcggaagacccagtgctgtgatgagtatgagtgtgcctgcaactgtgtcaactccacagtgagctgtccccttgggtacttggcctcaaccgccaccaatgactgtggctgtaccacaaccacctgccttcccgacaaggtgtgtgtccaccgaagcaccatctaccctgtgggccagttctgggaggagggctgcgatgtgtgcacctgcaccgacatggaggatgccgtgatgggcctccgcgtggcccagtgctcccagaagccctgtgaggacagctgtcggtcgggcttcacttacgttctgcatgaaggcgagtgctgtggaaggtgcctgccatctgcctgtgaggtggtgactggctcaccgcggggggactcccagtcttcctggaagagtgtcggctcccagtgggcctccccggagaacccctgcctcatcaatgagtgtgtccgagtgaaggaggaggtctttatacaacaaaggaacgtctcctgcccccagctggaggtccctgtctgcccctcgggctttcagctgagctgtaagacctcagcgtgctgcccaagctgtcgctgtgagcgcatggaggcctgcatgctcaatggcactgtcattgggcccgggaagactgtgatgatcgatgtgtgcacgacctgccgctgcatggtgcaggtgggggtcatctctggattcaagctggagtgcaggaagaccacctgcaacccctgccccctgggttacaaggaagaaaataacacaggtgaatgttgtgggagatgtttgcctacggcttgcaccattcagctaagaggaggacagatcatgacactgaagcgtgatgagacgctccaggatggctgtgatactcacttctgcaaggtcaatgagagaggagagtacttctgggagaagagggtcacaggctgcccaccctttgatgaacacaagtgtctggctgagggaggtaaaattatgaaaattccaggcacctgctgtgacacatgtgaggagcctgagtgcaacgacatcactgccaggctgcagtatgtcaaggtgggaagctgtaagtctgaagtagaggtggatatccactactgccagggcaaatgtgccagcaaagccatgtactccattgacatcaacgatgtgcaggaccagtgctcctgctgctctccgacacggacggagcccatgcaggtggccctgcactgcaccaatggctctgttgtgtaccatgaggttctcaatgccatggagtgcaaatgctcccccaggaagtgcagcaagtgaggctgctgcagctgcatgggtgcctgctgctgcc

SEQ ID NO: 4 - DNA, 3845 bp, Homo sapiens
cgctcgtcctggctggcctgggtcggcctctggagtatggtctggcgggtgccccctttcttgctccccatcctcttcttggcttctcatgtgggcgcggcggtggacctgacgctgctggccaacctgcggctcacggacccccagcgcttcttcctgacttgcgtgtctggggaggccggggcggggaggggctcggacgcctggggcccgcccctgctgctggagaaggacgaccgtatcgtgcgcaccccgcccgggccacccctgcgcctggcgcgcaacggttcgcaccaggtcacgcttcgcggcttctccaagccctcggacctcgtgggcgtcttctcctgcgtgggcggtgctggggcgcggcgcacgcgcgtcatctacgtgcacaacagccctggagcccacctgcttccagacaaggtcacacacactgtgaacaaaggtgacaccgctgtactttctgcacgtgtgcacaaggagaagcagacagacgtgatctggaagagcaacggatcctacttctacaccctggactggcatgaagcccaggatgggcggttcctgctgcagctcccaaatgtgcagccaccatcgagcggcatctacagtgccacttacctggaagccagccccctgggcagcgccttctttcggctcatcgtgcggggttgtggggctgggcgctgggggccaggctgtaccaaggagtgcccaggttgcctacatggaggtgtctgccacgaccatgacggcgaatgtgtatgcccccctggcttcactggcacccgctgtgaacaggcctgcagagagggccgttttgggcagagctgccaggagcagtgcccaggcatatcaggctgccggggcctcaccttctgcctcccagacccctatggctgctcttgtggatctggctggagaggaagccagtgccaagaagcttgtgcccctggtcattttggggctgattgccgactccagtgccagtgtcagaatggtggcacttgtgaccggttcagtggttgtgtctgcccctctgggtggcatggagtgcactgtgagaagtcagaccggatcccccagatcctcaacatggcctcagaactggagttcaacttagagacgatgccccggatcaactgtgcagctgcagggaaccccttccccgtgcggggcagcatagagctacgcaagccagacggcactgtgctcctgtccaccaaggccattgtggagccagagaagaccacagctgagttcgaggtgccccgcttggttcttgcggacagtgggttctgggagtgccgtgtgtccacatctggcggccaagacagccggcgcttcaaggtcaatgtgaaagtgccccccgtgcccctggctgcacctcggctcctgaccaagcagagccgccagcttgtggtctccccgctggtctcgttctctggggatggacccatctccactgtccgcctgcactaccggccccaggacagtaccatggactggtcgaccattgtggtggaccccagtgagaacgtgacgttaatgaacctgaggccaaagacaggatacagtgttcgtgtgcagctgagccggccaggggaaggaggagagggggcctgggggcctcccaccctcatgaccacagactgtcctgagcctttgttgcagccgtggttggagggctggcatgtggaaggcactgaccggctgcgagtgagctggtccttgcccttggtgcccgggccactggtgggcgacggtttcctgctgcgcctgtgggacgggacacgggggcaggagcggcgggagaacgtctcatccccccaggcccgcactgccctcctgacgggactcacgcctggcacccactaccagctggatgtgcagctctaccactgcaccctcctgggcccggcctcgccccctgcacacgtgcttctgccccccagtgggcctccagccccccgacacctccacgcccaggccctctcagactccgagatccagctgacatggaagcacccggaggctctgcctgggccaatatccaagtacgttgtggaggtgcaggtggctgggggtgcaggagacccactgtggatagacgtggacaggcctgaggagacaagcaccatcatccgtggcctcaacgccagcacgcgctacctcttccgcatgcgggccagcattcaggggctcggggactggagcaacacagtagaagagtccaccctgggcaacgggctgcaggctgagggcccagtccaagagagccgggcagctgaagagggcctggatcagcagctgatcctggcggtggtgggctccgtgtctgccacctgcctcaccatcctggccgcccttttaaccctggtgtgcatccgcagaagctgcctgcatcggagacgcaccttcacctaccagtcaggctcgggcgaggagaccatcctgcagttcagctcagggaccttgacacttacccggcggccaaaactgcagcccgagcccctgagctacccagtgctagagtgggaggacatcacctttgaggacctcatcggggaggggaacttcggccaggtcatccgggccatgatcaagaaggacgggctgaagatgaacgcagccatcaaaatgctgaaagagtatgcctctgaaaatgaccatcgtgactttgcgggagaactggaagttctgtgcaaattggggcatcaccccaacatcatcaacctcctgggggcctgtaagaaccgaggttacttgtatatcgctattgaatatgccccctacgggaacctgctagattttctgcggaaaagccgggtcctagagactgacccagcttttgctcgagagcatgggacagcctctacccttagctcccggcagctgctgcgtttcgccagtgatgcggccaatggcatgcagtacctgagtgagaagcagttcatccacagggacctggctgcccggaatgtgctggtcggagagaacctagcctccaagattgcagacttcggcctttctcggggagaggaggtttatgtgaagaagacgatggggcgtctccctgtgcgctggatggccattgagtccctgaactacagtgtctataccaccaagagtgatgtctggtcctttggagtccttctttgggagatagtgagccttggaggtacaccctactgtggcatgacctgtgccgagctctatgaaaagctgccccagggctaccgcatggagcagcctcgaaactgtgacgatgaagtgtacgagctgatgcgtcagtgctggcgggaccgtccctatgagcgacccccctttgcccagattgcgctacagctaggccgcatgctggaagccaggaaggcctatgtgaacatgtcgctgtttgagaacttcacttacgcgggcattgatgccacagctgaggaggcctgagctgccatccagccagaacgtggctctgctggccggagcaaactctgctgtctaacctgtgaccagtctgacccttacagcctctgacttaagctgcctcaaggaatttttttaacttaagggagaaaaaaagggatctggggatggggtgggcttaggggaactgggttcccatgctttgtaggtgtctcatagctatcctgggcatccttctttctagttcagctgccccacaggtgtgtttcccatcccactgctcccccaacacaaacccccactccagctccttcgcttaagccagcactcacaccactaacatgccctgttcagctactcccactcccggcctgtcattcagaaaaaaataaatgttctaataagctccaaaaaaa

SEQ ID NO: 5 - DNA, 1251 bp, Homo sapiens
ggagctgtttacccccactctaataggggttcaatataaaaagccggcagagagctgtccaagtcagacgcgcctctgcatctgcgccaggcgaacgggtcctgcgcctcctgcagtcccagctctccaccaccgccgcgtgcgcctgcagacgctccgctcgctgccttctctcctggcaggcgctgccttttctccccgttaaagggcacttgggctgaaggatcgctttgagatctgaggaacccgcagcgctttgagggacctgaagctgtttttcttcgttttcctttgggttcagtttgaacgggaggtttttgatccctttttttcagaatggattatttgctcatgattttctctctgctgtttgtggcttgccaaggagctccagaaacagcagtcttaggcgctgagctcagcgcggtgggtgagaacggcggggagaaacccactcccagtccaccctggcggctccgccggtccaagcgctgctcctgctcgtccctgatggataaagagtgtgtctacttctgccacctggacatcatttgggtcaacactcccgagcacgttgttccgtatggacttggaagccctaggtccaagagagccttggagaatttacttcccacaaaggcaacagaccgtgagaatagatgccaatgtgctagccaaaaagacaagaagtgctggaatttttgccaagcaggaaaagaactcagggctgaagacattatggagaaagactggaataatcataagaaaggaaaagactgttccaagcttgggaaaaagtgtatttatcagcagttagtgagaggaagaaaaatcagaagaagttcagaggaacacctaagacaaaccaggtcggagaccatgagaaacagcgtcaaatcatcttttcatgatcccaagctgaaaggcaagccctccagagagcgttatgtgacccacaaccgagcacattggtgacagacttcggggcctgtctgaagccatagcctccacggagagccctgtggccgactctgcactctccaccctggctgggatcagagcaggagcatcctctgctggttcctgactggcaaaggaccagcgtcctcgttcaaaacattccaagaaaggttaaggagttcccccaaccatcttcactggcttccatcagtggtaactgctttggtctcttctttcatctggggatgacaatggacctctcagcagaaacacacagtcacattcgaattc

SEQ ID NO: 6 - DNA, 2757 bp, Homo sapiens
tctaaaggtcgggggcagcagcaagatgcgaagcgagccgtacagatcccgggctctccgaacgcaacttcgccctgcttgagcgaggctgcggtttccgaggccctctccagccaaggaaaagctacacaaaaagcctggatcactcatcgaaccacccctgaagccagtgaaggctctctcgcctcgccctctagcgttcgtctggagtagcgccaccccggcttcctggggacacagggttggcaccatggggcccaccagcgtcccgctggtcaaggcccaccgcagctcggtctctgactacgtcaactatgatatcatcgtccggcattacaactacacgggaaagctgaatatcagcgcggacaaggagaacagcattaaactgacctcggtggtgttcattctcatctgctgctttatcatcctggagaacatctttgtcttgctgaccatttggaaaaccaagaaattccaccgacccatgtactattttattggcaatctggccctctcagacctgttggcaggagtagcctacacagctaacctgctcttgtctggggccaccacctacaagctcactcccgcccagtggtttctgcgggaagggagtatgtttgtggccctgtcagcctccgtgttcagtctcctcgccatcgccattgagcgctatatcacaatgctgaaaatgaaactccacaacgggagcaataacttccgcctcttcctgctaatcagcgcctgctgggtcatctccctcatcctgggtggcctgcctatcatgggctggaactgcatcagtgcgctgtccagctgctccaccgtgctgccgctctaccacaagcactatatcctcttctgcaccacggtcttcactctgcttctgctctccatcgtcattctgtactgcagaatctactccttggtcaggactcggagccgccgcctgacgttccgcaagaacatttccaaggccagccgcagctctgagaatgtggcgctgctcaagaccgtaattatcgtcctgagcgtcttcatcgcctgctgggcaccgctcttcatcctgctcctgctggatgtgggctgcaaggtgaagacctgtgacatcctcttcagagcggagtacttcctggtgttagctgtgctcaactccggcaccaaccccatcatttacactctgaccaacaaggagatgcgtcgggccttcatccggatcatgtcctgctgcaagtgcccgagcggagactctgctggcaaattcaagcgacccatcatcgccggcatggaattcagccgcagcaaatcggacaattcctcccacccccagaaagacgaaggggacaacccagagaccattatgtcttctggaaacgtcaactcttcttcctagaactggaagctgtccacccaccggaagcgctctttacttggtcgctggccaccccagtgtttggaaaaaaatctctgggcttcgactgctgccagggaggagctgctgcaagccagagggaggaagggggagaatacgaacagcctggtggtgtcgggtgttggtgggtagagttagttcctgtgaacaatgcactgggaagggtggagatcaggtcccggcctggaatatatattctacccccctggagctttgattttgcactgagccaaaggtctagcattgtcaagctcctaaagggttcatttggcccctcctcaaagactaatgtccccatgtgaaagcgtctctttgtctggagctttgaggagatgttttccttcactttagtttcaaacccaagtgagtgtgtgcacttctgcttctttagggatgccctgtacatcccacaccccaccctcccttcccttcatacccctcctcaacgttcttttactttatactttaactacctgagagttatcagagctggggttgtggaatgatcgatcatctatagcaaataggctatgttgagtacgtaggctgtgggaagatgaagatggtttggaggtgtaaaacaatgtccttcgctgaggccaaagtttccatgtaagcgggatccgttttttggaatttggttgaagtcactttgatttctttaaaaaacatcttttcaatgaaatgtgttaccatttcatatccattgaagccgaaatctgcataaggaagcccactttatctaaatgatattagccaggatccttggtgtcctaggagaaacagacaagcaaaacaaagtgaaaaccgaatggattaacttttgcaaaccaagggagatttcttagcaaatgagtctaacaaatatgacatccgtctttcccacttttgttgatgtttatttcagaatcttgtgtgattcatttcaagcaacaacatgttgtattttgttgtgttaaaagtacttttcttgatttttgaatgtatttgtttcaggaagaagtcattttatggatttttctaacccgtgttaacttttctagaatccaccctcttgtgcccttaagcattactttaactggtagggaacgccagaacttttaagtccagctattcattagatagtaattgaagatatgtataaatattacaaagaataaaaatatattactgtctctttagtatggttttcagtgcaattaaaccgagagatgtcttgtttttttaaaaagaatagtatttaataggtttctgacttttgtggatcattttgcacatagctttatcaacttttaaacattaataaactgatttttttaaag

SEQ ID NO: 7 - DNA, 2923 bp, Homo sapiens
cgaccatgagagataaggactgagggccaggaaggggaagcgagcccgccgagaggtggcggggactgctcacgccaagggccacagcggccgcgctccggcctcgctccgccgctccacgcctcgcgggatccgcgggggcagcccggccgggcggggatgccggggctggggcggagggcgcagtggctgtgctggtggtgggggctgctgtgcagctgctgcgggcccccgccgctgcggccgcccttgcccgctgccgcggccgccgccgccggggggcagctgctgggggacggcgggagccccggccgcacggagcagccgccgccgtcgccgcagtcctcctcgggcttcctgtaccggcggctcaagacgcaggagaagcgggagatgcagaaggagatcttgtcggtgctggggctcccgcaccggccccggcccctgcacggcctccaacagccgcagcccccggcgctccggcagcaggaggagcagcagcagcagcagcagctgcctcgcggagagccccctcccgggcgactgaagtccgcgcccctcttcatgctggatctgtacaacgccctgtccgccgacaacgacgaggacggggcgtcggagggggagaggcagcagtcctggccccacgaagcagccagctcgtcccagcgtcggcagccgcccccgggcgccgcgcacccgctcaaccgcaagagccttctggcccccggatctggcagcggcggcgcgtccccactgaccagcgcgcaggacagcgccttcctcaacgacgcggacatggtcatgagctttgtgaacctggtggagtacgacaaggagttctcccctcgtcagcgacaccacaaagagttcaagttcaacttatcccagattcctgagggtgaggtggtgacggctgcagaattccgcatctacaaggactgtgttatggggagttttaaaaaccaaacttttcttatcagcatttatcaagtcttacaggagcatcagcacagagactctgacctgtttttgttggacacccgtgtagtatgggcctcagaagaaggctggctggaatttgacatcacggccactagcaatctgtgggttgtgactccacagcataacatggggcttcagctgagcgtggtgacaagggatggagtccacgtccacccccgagccgcaggcctggtgggcagagacggcccttacgataagcagcccttcatggtggctttcttcaaagtgagtgaggtccacgtgcgcaccaccaggtcagcctccagccggcgccgacaacagagtcgtaatcgctctacccagtcccaggacgtggcgcgggtctccagtgcttcagattacaacagcagtgaattgaaaacagcctgcaggaagcatgagctgtatgtgagtttccaagacctgggatggcaggactggatcattgcacccaagggctatgctgccaattactgtgatggagaatgctccttcccactcaacgcacacatgaatgcaaccaaccacgcgattgtgcagaccttggttcaccttatgaaccccgagtatgtccccaaaccgtgctgtgcgccaactaagctaaatgccatctcggttctttactttgatgacaactccaatgtcattctgaaaaaatacaggaatatggttgtaagagcttgtggatgccactaactcgaaaccagatgctggggacacacattctgccttggattcctagattacatctgccttaaaaaaacacggaagcacagttggaggtgggacgatgagactttgaaactatctcatgccagtgccttattacccaggaagattttaaaggacctcattaataatttgctcacttggtaaatgacgtgagtagttgttggtctgtagcaagctgagtttggatgtctgtagcataaggtctggtaactgcagaaacataaccgtgaagctcttcctaccctcctcccccaaaaacccaccaaaattagttttagctgtagatcaagctatttggggtgtttgttagtaaatagggaaaataatctcaaaggagttaaatgtattcttggctaaaggatcagctggttcagtactgtctatcaaaggtagattttacagagaacagaaatcggggaagtggggggaacgcctctgttcagttcattcccagaagtccacaggacgcacagcccaggccacagccagggctccacggggcgcccttgtctcagtcattgctgttgtatgttcgtgctggagttttgttggtgtgaaaatacacttatttcagccaaaacataccatttctacacctcaatcctccatttgctgtactctttgctagtaccaaaagtagactgattacactgaggtgaggctacaaggggtgtgtaaccgtgtaacacgtgaaggcagtgctcacctcttctttaccagaacggttctttgaccagcacattaacttctggactgccggctctagtaccttttcagtaaagtggttctctgcctttttactatacagcataccacgccacagggttagaaccaacgaagaaaataaaatgagggtgcccagcttataagaatggtgttagggggatgagcatgctgtttatgaacggaaatcatgatttccctgtagaaagtgaggctcagattaaattttagaatattttctaaatgtctttttcacaatcatgtgactgggaaggcaatttcatactaaactgattaaataatacatttataatctacaactgtttgcacttacagctttttttgtaaatataaactataatttattgtctattttatatctgttttgctgtggcgttggggggggggccgggcttttgggggggggggtttgtttggggggtgtcgtggtgtgggcgggcgg

SEQ ID NO: 8 - DNA, 573 bp, Homo sapiens
gccagccctgcctgcccaccaggaggatgaaggtctccgtggctgccctctcctgcctcatgcttgttactgcccttggatcccaggcccgggtcacaaaagatgcagagacagagttcatgatgtcaaagcttccattggaaaatccagtacttctggacatgctctggaggagaaagattggtcctcagatgaccctttctcatgctgcaggattccatgctactagtgctgactgctgcatctcctacaccccacgaagcatcccgtgttcactcctggagagttactttgaaacgaacagcgagtgctccaagccgggtgtcatcttcctcaccaagaaggggcgacgtttctgtgccaaccccagtgataagcaagttcaggtttgcatgagaatgctgaagctggacacacggatcaagaccaggaagaattgaacttgtcaaggtgaagggacacaagttgccagccaccaactttcttgcctcaactaccttcctgaattatttttttaagaagcatttattcttgtgttctggatttagagcaattcatctaataaacagtttc

SEQ ID NO: 9 - DNA, 495 bp, Homo sapiens
  modified_base (9): a, t, c, g, other or unknown
  modified_base (193): a, t, c, g, other or unknown
  modified_base (369): a, t, c, g, other or unknown
  modified_base (376)..(377): a, t, c, g, other or unknown
  modified_base (401): a, t, c, g, other or unknown
  modified_base (458): a, t, c, g, other or unknown
  modified_base (460): a, t, c, g, other or unknown
ctagtatgngttttacttattcagactgataatcatattagtgactatccccatgtaagagggcacttggcaattaaacatgctacacagcatggcatcacttttttttataactcattaaacacagtaaaattttaatcatttttgttttaaagttttctagcttgataagttatgtgctggccttgcctanttggtgaaatggtataaaatatcatatgcagttttaaaactttttatatttttgcaataaagtacattttgactttgttggcataatgtcagtaacatacatattccagtggttttatggacaggcaatttagtcattatgataataaggaaaacagtgttttagatgagagatcnttaatgnntttttcccccatccagccatatancccgcctttttttaatttgccaatccccggtattcccatggcctttaaaaaattggncntggaccatttaaagggccccaagttttggtttttt

SEQ ID NO: 10 - DNA, 461 bp, Homo sapiens
gcaatgagataacgttttattttaattctcaccatttatatacaaacacaagtgaataaaacacatcgcaaaatggtaaaatttcatatttagtatttataggtgcatagtttcatgctcacatatttttgagtattatatatattaacaaatttcacaatacgtcattattcttagacagtatcattaaaagacacctaaaaatcttataatatatgatagcaaatcactaacaacttctgaacaacagcaacaaaaaaatagtgaggatttagaaataagtggtagtcacttaggtgtttttaatttgttttaacatcgtagattgaagccacaaaatccacagcacacaaagaccctgctaccatgtattcacttcagtgaaagggaagcaccgaaatgctgagtgggggcaggtacagatacatcaatcactgctgatggaagacttcgagatacac

SEQ ID NO: 11 - DNA, 1192 bp, Homo sapiens
gaattcatgccgggcccagccgagcgcgcagcgggcacgccgcgcgcgcggagcagccgtgcccgccgcccgggcccgccgccagggcgcacacgctcccgcccccctacccggcccgggcgggagtttgcacctctccctgcccgggtgctcgagctgccgttgcaaagccaactttggaaaaagttttttgggggagacttgggccttgaggtgcccagctccgcgctttccgattttgggggcctttccagaaaatgttgcaaaaaagctaagccggcgggcagaggaaaacgcctgtagccggcgagtgaagacgaaccatcgactgccgtgttccttttcctcttggaggttggagtcccctgggcgcccccacacggctagacgcctcggctggttcgcgacgcagccccccggccgtggatgctgcactcgggctcgggatccgcccaggtagccggcctcggacccaggtcctgcgcccaggtcctcccctgccccccagcgacggagccggggccgggggcggcggcgccgggggcatgcgggtgagccgcggctgcagaggcctgagcgcctgatcgccgcggacccgagccgagcccacccccctccccagccccccaccctggccgcgggggcggcgcgctcgatctacgcgttcggggccccgcggggccgggcccggagtcggcatgaatcgctgctgggcgctcttcctgtctctctgctgctacctgcgtctggtcagcgccgaggtgagtgccacggcggctggggctggttcttcattcattaccttcgccccccccttctgaccgccccctcctctccctgcagtgaactttggacccttgcacccgcgagcctgacgccgggcgctgggtgacctcttcgggctgggagcgaggtccgggggtgacaggctctaagggaaggcaacagcggtggctttctttccaaccggcgggcgaatctggctccctaagccgttccgtgtcgggggagggtgtgtgtggccctgtcccccaccctttgggaacccgagaacaagcccctcccggccgggggagagggggtggggtggtgcccagggtgcagaaggcagcgcgtcctcccgagcccacttcggcgccagcctcggcttaggctctgtcctgccatcggcttgcccaggaggtgcaagctt

SEQ ID NO: 12 - DNA, 290 bp, Homo sapiens
gctgcaccgtgagcgccgaggacaaggcggcggccgagcgctctaagatgatcgacaagaacctgcgggaggacggagagaaggcggcgcgggaggtgaagttgctgctgttgggtgctggggagtcagggaagagcaccatcgtcaagcaggtgtaggtcattcccgggggttgcttattccgggggggattcccgcagtacgcgcggttgtctacagcaacaacatccagtccatcatggccattgtcaaagccatgggcaacctgcagatcgactttgccgacccct

SEQ ID NO: 13 - DNA, 411 bp, Homo sapiens
  modified_base (410): a, t, c, g, other or unknown
aagacagagtggactgttacaaatgattttgcaaaatacaaaaatagatatacttccactgaatgctttaatcatttttccgggcactctcatcttttggttcttcctcatctgagtacacagtgggctcctccccctccttcagcagtttgcccacgtgatgatacttgaaagtgaactgagactcccagtcactcagagtctcctgctgggcagcagtgaggtcagaaaggtcatcgtactcatccttcagtgcttccttatccaggcaaaatgtggcaaggccctggatgcatctcttccagcaaagaccccatacggcccctctttcaaaaacaaaaccaaagatcaattctttattagacagtcaatttctctgtgatttatacacagaaaatgggcttccctant

SEQ ID NO: 14 - DNA, 579 bp, Homo sapiens
atgcaggccatcaagtgtgtggtggtgggagatggggccgtgggcaagacctgccttctcatcagctacaccaccaacgcctttcccggagagtacatccccaccgtgtttgacaactattcagccaatgtgatggtggacagcaagccagtgaacctggggctgtgggacactgctgggcaggaggactacgaccgtctccggccgctctcctatccacagacggacgtcttcctcatctgcttctccctcgtcagcccagcctcttatgagaacgtccgcgccaagtggttcccagaagtgcggcaccactgccccagcacacccatcatcctggtgggcaccaagctggacctgcgggacgacaaggacaccatcgagaaactgaaggagaagaagctggctcccatcacctacccgcagggcctggcactggccaaggagattgactcggtgaaatacctggagtgctcagccctcacccagagaggcctgaaaaccgtgttcgacgaggccatccgggccgtgctgtgccctcagcccacgcggcagcagaagcgcgcctgcagcctcctctag

SEQ ID NO: 15 - DNA, 627 bp, Homo sapiens
  modified_base (596): a, t, c, g, other or unknown
  modified_base (601): a, t, c, g, other or unknown
gtgtttttggaagtttattatatgaagatggtatacaaaatacattcatcatgactagaaatataggaccaaaccatgtctgtcttatatctgtagcatatattcttggtttgtataaaagtaactttaaaattccagtttccttaaatagttatgcacaaaacacacatacacccacacacacacacacacacacacacacacatacagttacaccactgtcggccaaagatgcactcctcctttaatcaatttaaatgaggctagcgagtatctgtttgatgtttgcattcttgtgggctaggaaacaaggcacgggtccctaaaattaacatctcggtgtcacttcttggactgacaagacacagacttgcacatggtttcagccccattccacccagactgttccacgtacattatctcagaaactctgaaaggaagtgctcgttctttgttagtgccaaccatttttgtcataaatggcaaatgattgggatattatcagttaattcatgtttcaatttcagtgctattttaatggacaagcacttgtaactagcccattattacaagtctccatttttttccacattaanctccngagggaccatctttggccgatggagg

SEQ ID NO: 16 - DNA, 376 bp, Homo sapiens
  modified_base (255): a, t, c, g, other or unknown
  modified_base (257): a, t, c, g, other or unknown
  modified_base (290): a, t, c, g, other or unknown
  modified_base (292): a, t, c, g, other or unknown
  modified_base (362): a, t, c, g, other or unknown
gttgggggaggacgggttgccgactcgcctacctagcggtctcttgattgtcgacattttgttggcataggtttatgtagagacgtatacatatatatagacacactgtctataaatctaggcctgtatccggtgtccgaggcgaactcagtaagatgatgttaagaggaaacctgaagcaagtgcgcattgagaaaaacccggcccgccttcgcgccctggagtccgcggtgggcgagacgagccggcgcccgncnagccattggcgctcgctcttgccggggagccancncgcccgcgcccggcctccagaggaccacccggacgaggagatggggttcactatcgacatcaagagtttncctcaagccgggcg

SEQ ID NO: 17 - DNA, 1365 bp, Homo sapiens
ataattccatccctcctccaacttttccctctcaagctctgcccttcccagcccagcccagcctacccaacctcatctcttccctgtagaccacatcccaccatgttcccctgagcctccaaggaaggggctcaggggccccatggcctcccgctccctgtggccccacagcccccgtgggccaggggaagcgccccagaagccgaagtgcccaccatgggcaaccacacgtgggagggctgccacgtggactcgcgcgtggaccacctctttccgccatccctctacatctttgtcatcggcgtggggctgcccaccaactgcctggctctgtgggcggcctaccgccaggtgcaacagcgcaacgagctgggcgtctacctgatgaacctcagcatcgccgacctgctgtacatctgcacgctgccgctgtgggtggactacttcctgcaccacgacaactggatccacggccccgggtcctgcaagctctttgggttcatcttctacaccaatatctacatcagcatcgccttcctgtgctgcatctcggtggaccgctacctggctgtggcccacccactccgcttcgcccgcctgcgccgcgtcaagaccgccgtggccgtgagctccgtggtctgggccacggagctgggcgccaactcggcgcccctgttccatgacgagctcttccgagaccgctacaaccacaccttctgctttgagaagttccccatggaaggctgggtggcctggatgaacctctatcgggtgttcgtgggcttcctcttcccgtgggcgctcatgctgctgtcgtaccggggcatcctgcgggccgtgcggggcagcgtgtccaccgagcgccaggagaaggccaagatcaagcggctggccctcagcctcatcgccatcgtgctggtctgctttgcgccctatcacgtgctcttgctgtcccgcagcgccatctacctgggccgcccctgggactgcggcttcgaggagcgcgtcttttctgcataccacagctcactggctttcaccagcctcaactgtgtggcggaccccatcctctactgcctggtcaacgagggcgcccgcagcgatgtggccaaggccctgcacaacctgctccgctttctggccagcgacaagccccaggagatggccaatgcctcgctcaccctggagaccccactcacctccaagaggaacagcacagccaaagccatgactggcagctgggcggccactccgcctcccagggggaccaggtgcagctgaagatgctgccgccagcacaatgaaccccgagtggcacagaatccccagttttcccctctcatcccacagtcccttctctcctgg

SEQ ID NO: 18 - DNA, 2090 bp, Homo sapiens
gttggcgaggagtttcctgtttcccccgcagcgctgagttgaagttgagtgagtcactcgcgcgcacggagcgacgacacccccgcgcgtgcacccgctcgggacaggagccggactcctgtgcagcttccctcggccgccgggggcctccccgcgcctcgccggcctccaggcccctcctggctggcgagcgggcgccacatctggcccgcacatctgcgctgccggcccggcgcggggtccggagagggcgcggcgcggagcgcagccaggggtccgggaaggcgccgtccgtgcgctgggggctcggtctatgacgagcagcggggtctgccatgggtcgggggctgctcaggggcctgtggccgctgcacatcgtcctgtggacgcgtatcgccagcacgatcccaccgcacgttcagaagtcggttaataacgacatgatagtcactgacaacaacggtgcagtcaagtttccacaactgtgtaaattttgtgatgtgagattttccacctgtgacaaccagaaatcctgcatgagcaactgcagcatcacctccatctgtgagaagccacaggaagtctgtgtggctgtatggagaaagaatgacgagaacataacactagagacagtttgccatgaccccaagctcccctaccatgactttattctggaagatgctgcttctccaaagtgcattatgaaggaaaaaaaaaagcctggtgagactttcttcatgtgttcctgtagctctgatgagtgcaatgacaacatcatcttctcagaagaatataacaccagcaatcctgacttgttgctagtcatatttcaagtgacaggcatcagcctcctgccaccactgggagttgccatatctgtcatcatcatcttctactgctaccgcgttaaccggcagcagaagctgagttcaacctgggaaaccggcaagacgcggaagctcatggagttcagcgagcactgtgccatcatcctggaagatgaccgctctgacatcagctccacgtgtgccaacaacatcaaccacaacacagagctgctgcccattgagctggacaccctggtggggaaaggtcgctttgctgaggtctataaggccaagctgaagcagaacacttcagagcagtttgagacagtggcagtcaagatctttccctatgaggagtatgcctcttggaagacagagaaggacatcttctcagacatcaatctgaagcatgagaacatactccagttcctgacggctgaggagcggaagacggagttggggaaacaatactggctgatcaccgccttccacgccaagggcaacctacaggagtacctgacgcggcatgtcatcagctgggaggacctgcgcaagctgggcagctccctcgcccgggggattgctcacctccacagtgatcacactccatgtgggaggcccaagatgcccatcgtgcacagggacctcaagagctccaatatcctcgtgaagaacgacctaacctgctgcctgtgtgactttgggctttccctgcgtctggaccctactctgtctgtggatgacctggctaacagtgggcaggtgggaactgcaagatacatggctccagaagtcctagaatccaggatgaatttggagaatgctgagtccttcaagcagaccgatgtctactccatggctctggtgctctgggaaatgacatctcgctgtaatgcagtgggagaagtaaaagattatgagcctccatttggttccaaggtgcgggagcacccctgtgtcgaaagcatgaaggacaacgtgttgagagatcgagggcgaccagaaattcccagcttctggctcaaccaccagggcatccagatggtgtgtgagacgttgactgagtgctgggaccacgacccagaggcccgtctcacagcccagtgtgtggcagaacgcttcagtgagctggagcatctggacaggctctcggggaggagctgctcggaggagaagattcctgaagacggctccctaaacactaccaaatagctcttatggggcaggctgggcatgtccaaagaggctgcccctctcaccaaa

SEQ ID NO: 19 - DNA, 5722 bp, Homo sapiens
ggacgcacaggcattccccgcgcccctccagccctcgccgccctcgccaccgctcccggccgccgcgctccggtacacacaggatccctgctgggcaccaacagctccaccatggggctggcctggggactaggcgtcctgttcctgatgcatgtgtgtggcaccaaccgcattccagagtctggcggagacaacagcgtgtttgacatctttgaactcaccggggccgcccgcaaggggtctgggcgccgactggtgaagggccccgacccttccagcccagctttccgcatcgaggatgccaacctgatcccccctgtgcctgatgacaagttccaagacctggtggatgctgtgcgggcagaaaagggtttcctccttctggcatccctgaggcagatgaagaagacccggggcacgctgctggccctggagcggaaagaccactctggccaggtcttcagcgtggtgtccaatggcaaggcgggcaccctggacctcagcctgaccgtccaaggaaagcagcacgtggtgtctgtggaagaagctctcctggcaaccggccagtggaagagcatcaccctgtttgtgcaggaagacagggcccagctgtacatcgactgtgaaaagatggagaatgctgagttggacgtccccatccaaagcgtcttcaccagagacctggccagcatcgccagactccgcatcgcaaaggggggcgtcaatgacaatttccagggggtgctgcagaatgtgaggtttgtctttggaaccacaccagaagacatcctcaggaacaaaggctgctccagctctaccagtgtcctcctcacccttgacaacaacgtggtgaatggttccagccctgccatccgcactaactacattggccacaagacaaaggacttgcaagccatctgcggcatctcctgtgatgagctgtccagcatggtcctggaactcaggggcctgcgcaccattgtgaccacgctgcaggacagcatccgcaaagtgactgaagagaacaaagagttggccaatgagctgaggcggcctcccctatgctatcacaacggagttcagtacagaaataacgaggaatggactgttgatagctgcactgagtgtcactgtcagaactcagttaccatctgcaaaaaggtgtcctgccccatcatgccctgctccaatgccacagttcctgatggagaatgctgtcctcgctgttggcccagcgactctgcggacgatggctggtctccatggtccgagtggacctcctgttctacgagctgtggcaatggaattcagcagcgcggccgctcctgcgatagcctcaacaaccgatgtgagggctcctcggtccagacacggacctgccacattcaggagtgtgacaaaagatttaaacaggatggtggctggagccactggtccccgtggtcatcttgttctgtgacatgtggtgatggtgtgatcacaaggatccggctctgcaactctcccagcccccagatgaatgggaaaccctgtgaaggcgaagcgcgggagaccaaagcctgcaagaaagacgcctgccccatcaatggaggctggggtccttggtcaccatgggacatctgttctgtcacctgtggaggaggggtacagaaacgtagtcgtctctgcaacaaccccgcaccccagtttggaggcaaggactgcgttggtgatgtaacagaaaaccagatctgcaacaagcaggactgtccaattgatggatgcctgtccaatccctgctttgccggcgtgaagtgtactagctaccctgatggcagctggaaatgtggtgcttgtccccctggttacagtggaaatggcatccagtgcacagatgttgatgagtgcaaagaagtgcctgatgcctgcttcaaccacaatggagagcaccggtgtgagaacacggaccccggctacaactgcctgccctgccccccacgcttcaccggctcacagcccttcggccagggtgtcgaacatgccacggccaacaaacaggtgtgcaagccccgtaacccctgcacggatgggacccacgactgcaacaagaacgccaagtgcaactacctgggccactatagcgaccccatgtaccgctgcgagtgcaagcctggctacgctggcaatggcatcatctgcggggaggacacagacctggatggctggcccaatgagaacctggtgtgcgtggccaatgcgacttaccactgcaaaaaggataattgccccaaccttcccaactcagggcaggaagactatgacaaggatggaattggtgatgcctgtgatgatgacgatgacaatgataaaattccagatgacagggacaactgtccattccattacaacccagctcagtatgactatgacagagatgatgtgggagaccgctgtgacaactgtccctacaaccacaacccagatcaggcagacacagacaacaatggggaaggagacgcctgtgctgcagacattgatggagacggtatcctcaatgaacgggacaactgccagtacgtctacaatgtggaccagagagacactgatatggatggggttggagatcagtgtgacaattgccccttggaacacaatccggatcagctggactctgactcagaccgcattggagatacctgtgacaacaatcaggatattgatgaagatggccaccagaacaatctggacaactgtccctatgtgcccaatgccaaccaggctgaccatgacaaagatggcaagggagatgcctgtgaccacgatgatgacaacgatggcattcctgatgacaaggacaactgcagactcgtgcccaatcccgaccagaaggactctgacggcgatggtcgaggtgatgcctgcaaagatgattttgaccatgacagtgtgccagacatcgatgacatctgtcctgagaatgttgacatcagtgagaccgatttccgccgattccagatgattcctctggaccccaaagggacatcccaaaatgaccctaactgggttgtacgccatcagggtaaagaactcgtccagactgtcaactgtgatcctggactcgctgtaggttatgatgagtttaatgctgtggacttcagtggcaccttcttcatcaacaccgaaagggacgatgactatgctggatttgtctttggctaccagtccagcagccgcttttatgttgtgatgtggaagcaagtcacccagtcctactgggacaccaaccccacgagggctcagggatactcgggcctttctgtgaaagttgtaaactccaccacagggcctggcgagcacctgcggaacgccctgtggcacacaggaaacacccctggccaggtgcgcaccctgtggcatgaccctcgtcacataggctggaaagatttcaccgcctacagatggcgtctcagccacaggccaaagacgggtttcattagagtggtgatgtatgaagggaagaaaatcatggctgactcaggacccatctatgataaaacctatgctggtggtagactagggttgtttgtcttctctcaagaaatggtgttcttctctgacctgaaatacgaatgtagagatccctaatcatcaaattgttgattgaaagactgatcataaaccaatgctggtattgcaccttctggaactatgggcttgagaaaacccccaggatcacttctccttggcttccttcttttctgtgcttgcatcagtgtggactcctagaacgtgcgacctgcctcaagaaaatgcagttttcaaaaacagactcatcagcattcagcctccaatgaataagacatcttccaagcatataaacaattgctttggtttccttttgaaaaagcatctacttgcttcagttgggaaggtgcccattccactctgcctttgtcacagagcagggtgctattgtgaggccatctctgagcagtggactcaaaagcattttcaggcatgtcagagaagggaggactcactagaattagcaaacaaaaccaccctgacatcctccttcaggaacacggggagcagaggccaaagcactaaggggagggcgcatacccgagacgattgtatgaagaaaatatggaggaactgttacatgttcggtactaagtcattttcaggggattgaaagactattgctggatttcatgatgctgactggcgttagctgattaacccatgtaaataggcacttaaatagaagcaggaaagggagacaaagactggcttctggacttcctccctgatccccacccttactcatcaccttgcagtggccagaattagggaatcagaatcaaaccagtgtaaggcagtgctggctgccattgcctggtcacattgaaattggtggcttcattctagatgtagcttgtgcagatgtagcaggaaaataggaaaacctaccatctcagtgagcaccagctgcctcccaaaggaggggcagccgtgcttatatttttatggttacaatggcacaaaattattatcaacctaactaaaacattccttttctcttttttccgtaattactaggtagttttctaattctctcttttggaagtatgatttttttaaagtctttacgatgtaaaatatttattttttacttattctggaagatctggctgaaggattattcatggaacaggaagaagcgtaaagactatccatgtcatctttgttgagagtcttcgtgactgtaagattgtaaatacagattatttattaactctgttctgcctggaaatttaggcttcatacggaaagtgtttgagagcaagtagttgacatttatcagcaaatctcttgcaagaacagcacaaggaaaatcagtctaataagctgctctgccccttgtgctcagagtggatgttatgggattccttttttctctgttttatcttttcaagtggaattagttggttatccatttgcaaatgttttaaattgcaaagaaagccatgaggtcttcaatactgttttaccccatcccttgtgcatatttccagggagaaggaaagcatatacacttttttctttcatttttccaaaagagaaaaaaatgacaaaaggtgaaacttacatacaaatattacctcatttgttgtgtgactgagtaaagaatttttggatcaagcggaaagagtttaagtgtctaacaaacttaaagctactgtagtacctaaaaagtcagtgttgtacatagcataaaaactctgcagagaagtattcccaataaggaaatagcattgaaatgttaaatacaatttctgaaagttatgttttttttctatcatctggtataccattgctttatttttataaattattttctcattgccattggaatagaatattcagattgtgtagatatgctatttaaataatttatcaggaaatactgcctgtagagttagtatttctatttttatataatgtttgcacactgaattgaagaattgttggttttttcttttttttgttttttttttttttttttttttttttgcttttgacctcccatttttactatttgccaatacctttttctaggaatgtgcttttttttgtacacatttttatccattttacattctaaagcagtgtaagttgtatattactgtttcttatgtacaaggaacaacaataaatcatatggaaatttatattt

SEQ ID NO: 20 - DNA, 348 bp, Homo sapiens
tgaacatattcattgtttgtttattaataaattaccattcagtttgaatgagacctatatgtctggatactttaatagagctttaattattacgaaaaaagatttcagagataaaacactagaagttacctattctccacctaaatctctgaaaaatggagaaaccctctgactagtccatgtcaaattttactaaaagtctttttgtttagatttattttcctgcagcatcttctgcaaaatgtactatatagtcagcttgctttgaggctagtaaaaagatatttttctaaacagattggagttggcatataaacaaatacgttttctcactaatgacagtccatg

SEQ ID NO: 21 - DNA, 3811 bp, Homo sapiens
acagggccactgctgctcacagaagcagtgaggatgatgccaggatgatgtctgcctcgcgcctggctgggactctgatcccagccatggccttcctctcctgcgtgagaccagaaagctgggagccctgcgtggagacttggccctaaaccacacagaagagctggcatgaaacccagagctttcagactccggagcctcagcccttcaccccgattccattgcttcttgctaaatgctgccgttttatcacggaggtggttcctaatattacttatcaatgcatggagctgaatttctacaaaatccccgacaacctccccttctcaaccaagaacctggacctgagctttaatcccctgaggcatttaggcagctatagcttcttcagtttcccagaactgcaggtgctggatttatccaggtgtgaaatccagacaattgaagatggggcatatcagagcctaagccacctctctaccttaatattgacaggaaaccccatccagagtttagccctgggagccttttctggactatcaagtttacagaagctggtggctgtggagacaaatctagcatctctagagaacttccccattggacatctcaaaactttgaaagaacttaatgtggctcacaatcttatccaatctttcaaattacctgagtatttttctaatctgaccaatctagagcacttggacctttccagcaacaagattcaaagtatttattgcacagacttgcgggttctacatcaaatgcccctactcaatctctctttagacctgtccctgaaccctatgaactttatccaaccaggtgcatttaaagaaattaggcttcataagctgactttaagaaataattttgatagtttaaatgtaatgaaaacttgtattcaaggtctggctggtttagaagtccatcgtttggttctgggagaatttagaaatgaaggaaacttggaaaagtttgacaaatctgctctagagggcctgtgcaatttgaccattgaagaattccgattagcatacttagactactacctcgatgatattattgacttatttaattgtttgacaaatgtttcttcattttccctggtgagtgtgactattgaaagggtaaaagacttttcttataatttcggatggcaacatttagaattagttaactgtaaatttggacagtttcccacattgaaactcaaatctctcaaaaggcttactttcacttccaacaaaggtgggaatgctttttcagaagttgatctaccaagccttgagtttctagatctcagtagaaatggcttgagtttcaaaggttgctgttctcaaagtgattttgggacaaccagcctaaagtatttagatctgagcttcaatggtgttattaccatgagttcaaacttcttgggcttagaacaactagaacatctggatttccagcattccaatttgaaacaaatgagtgagttttcagtattcctatcactcagaaacctcatttaccttgacatttctcatactcacaccagagttgctttcaatggcatcttcaatggcttgtccagtctcgaagtcttgaaaatggctggcaattctttccaggaaaacttccttccagatatcttcacagagctgagaaacttgaccttcctggacctctctcagtgtcaactggagcagttgtctccaacagcatttaactcactctccagtcttcaggtactaaatatgagccacaacaacttcttttcattggatacgtttccttataagtgtctgaactccctccaggttcttgattacagtctcaatcacataatgacttccaaaaaacaggaactacagcattttccaagtagtctagctttcttaaatcttactcagaatgactttgcttgtacttgtgaacaccagagtttcctgcaatggatcaaggaccagaggcagctcttggtggaagttgaacgaatggaatgtgcaacaccttcagataagcagggcatgcctgtgctgagtttgaatatcacctgtcagatgaataagaccatcattggtgtgtcggtcctcagtgtgcttgtagtatctgttgtagcagttctggtctataagttctattttcacctgatgcttcttgctggctgcataaagtatggtagaggtgaaaacatctatgatgcctttgttatctactcaagccaggatgaggactgggtaaggaatgagctagtaaagaatttagaagaaggggtgcctccatttcagctctgccttcactacagagactttattcccggtgtggccattgctgccaacatcatccatgaaggtttccataaaagccgaaaggtgattgttgtggtgtcccagcacttcatccagagccgctggtgtatctttgaatatgagattgctcagacctggcagtttctgagcagtcgtgctggtatcatcttcattgtcctgcagaaggtggagaagaccctgctcaggcagcaggtggagctgtaccgccttctcagcaggaacacttacctggagtgggaggacagtgtcctggggcggcacatcttctggagacgactcagaaaagccctgctggatggtaaatcatggaatccagaaggaacagtgggtacaggatgcaattggcaggaagcaacatctatctgaagaggaaaaataaaaacctcctgaggcatttcttgcccagctgggtccaacacttgttcagttaataagtattaaatgctgccacatgtcaggccttatgctaagggtgagtaattccatggtgcactagatatgcagggctgctaatctcaaggagcttccagtgcagagggaataaatgctagactaaaatacagagtcttccaggtgggcatttcaaccaactcagtcaaggaacccatgacaaagaaagtcatttcaactcttacctcatcaagttgaataaagacagagaaaacagaaagagacattgttcttttcctgagtcttttgaatggaaattgtattatgttatagccatcataaaaccattttggtagttttgactgaactgggtgttcactttttcctttttgattgaatacaatttaaattctacttgatgactgcagtcgtcaaggggctcctgatgcaagatgccccttccattttaagtctgtctccttacagaggttaaagtctaatggctaattcctaaggaaacctgattaacacatgctcacaaccatcctggtcattctcgaacatgttctattttttaactaatcacccctgatatatttttatttttatatatccagttttcatttttttacgtcttgcctataagctaatatcataaataaggttgtttaagacgtgcttcaaatatccatattaaccactatttttcaaggaagtatggaaaagtacactctgtcactttgtcactcgatgtcattccaaagttattgcctactaagtaatgactgtcatgaaagcagcattgaaataatttgtttaaagggggcactcttttaaacgggaagaaaatttccgcttcctggtcttatcatggacaatttgggctataggcatgaaggaagtgggattacctcaggaagtcaccttttcttgattccagaaacatatgggctgataaacccggggtgacctcatgaaatgagttgcagcagatgtttatttttttcagaacaagtgatgtttgatggacctatgaatctatttagggagacacagatggctgggatccctcccctgtacccttctcactgacaggagaacta

SEQ ID NO: 22 - DNA, 3683 bp, Homo sapiens
gcgagcgcagcggagcctggagagaaggcgctgggctgcgagggcgcgagggcgcgagggcagggggcaaccggaccccgcccgcacccatggcgcccgtcgccgtctgggccgcgctggccgtcggactggagctctgggctgcggcgcacgccttgcccgcccaggtggcatttacaccctacgccccggagcccgggagcacatgccggctcagagaatactatgaccagacagctcagatgtgctgcagcaaatgctcgccgggccaacatgcaaaagtcttctgtaccaagacctcggacaccgtgtgtgactcctgtgaggacagcacatacacccagctctggaactgggttcccgagtgcttgagctgtggctcccgctgtagctctgaccaggtggaaactcaagcctgcactcgggaacagaaccgcatctgcacctgcaggcccggctggtactgcgcgctgagcaagcaggaggggtgccggctgtgcgcgccgctgcgcaagtgccgcccgggcttcggcgtggccagaccaggaactgaaacatcagacgtggtgtgcaagccctgtgccccggggacgttctccaacacgacttcatccacggatatttgcaggccccaccagatctgtaacgtggtggccatccctgggaatgcaagcatggatgcagtctgcacgtccacgtcccccacccggagtatggccccaggggcagtacacttaccccagccagtgtccacacgatcccaacacacgcagccaactccagaacccagcactgctccaagcacctccttcctgctcccaatgggccccagccccccagctgaagggagcactggcgacttcgctcttccagttggactgattgtgggtgtgacagccttgggtctactaataataggagtggtgaactgtgtcatcatgacccaggtgaaaaagaagcccttgtgcctgcagagagaagccaaggtgcctcacttgcctgccgataaggcccggggtacacagggccccgagcagcagcacctgctgatcacagcgccgagctccagcagcagctccctggagagctcggccagtgcgttggacagaagggcgcccactcggaaccagccacaggcaccaggcgtggaggccagtggggccggggaggcccgggccagcaccgggagctcagattcttcccctggtggccatgggacccaggtcaatgtcacctgcatcgtgaacgtctgtagcagctctgaccacagctcacagtgctcctcccaagccagctccacaatgggagacacagattccagcccctcggagtccccgaaggacgagcaggtccccttctccaaggaggaatgtgcctttcggtcacagctggagacgccagagaccctgctggggagcaccgaagagaagcccctgccccttggagtgcctgatgctgggatgaagcccagttaaccaggccggtgtgggctgtgtcgtagccaaggtgggctgagccctggcaggatgaccctgcgaaggggccctggtccttccaggcccccaccactaggactctgaggctctttctgggccaagttcctctagtgccctccacagccgcagcctccctctgacctgcaggccaagagcagaggcagcgagttggggaaagcctctgctgccatggtgtgtccctctcggaaggctggctgggcatggacgttcggggcatgctggggcaagtccctgactctctgtgacctgccccgcccagctgcacctgccagcctggcttctggagcccttgggttttttgtttgtttgtttgtttgtttgtttgtttctccccctgggctctgcccagctctggcttccagaaaaccccagcatccttttctgcagaggggctttctggagaggagggatgctgcctgagtcacccatgaagacaggacagtgcttcagcctgaggctgagactgcgggatggtcctggggctctgtgtagggaggaggtggcagccctgtagggaacggggtccttcaagttagctcaggaggcttggaaagcatcacctcaggccaggtgcagtggctcacgcctatgatcccagcactttgggaggctgaggcgggtggatcacctgaggttaggagttcgagaccagcctggccaacatggtaaaaccccatctctactaaaaatacagaaattagccgggcgtggtggcgggcacctatagtcccagctactcagaagcctgaggctgggaaatcgtttgaacccgggaagcggaggttgcagggagccgagatcacgccactgcactccagcctgggcgacagagcgagagtctgtctcaaaagaaaaaaaaaaaagcaccgcctccaaatgctaacttgtccttttgtaccatggtgtgaaagtcagatgcccagagggcccaggcaggccaccatattcagtgctgtggcctgggcaagataacgcacttctaactagaaatctgccaattttttaaaaaagtaagtaccactcaggccaacaagccaacgacaaagccaaactctgccagccacatccaaccccccacctgccatttgcaccctccgccttcactccggtgtgcctgcagccccgcgcctccttccttgctgtcctaggccacaccatctcctttcagggaatttcaggaactagagatgactgagtcctcgtagccatctctctactcctacctcagcctagaccctcctcctcccccagaggggtgggttcctcttccccactccccaccttcaattcctgggccccaaacgggctgccctgccactttggtacatggccagtgtgatcccaagtgccagtcttgtgtctgcgtctgtgttgcgtgtcgtgggtgtgtgtagccaaggtcggtaagttgaatggcctgccttgaagccactgaagctgggattcctccccattagagtcagccttccccctcccagggccagggccctgcagaggggaaaccagtgtagccttgcccggattctgggaggaagcaggttgaggggctcctggaaaggctcagtctcaggagcatggggataaaggagaaggcatgaaattgtctagcagagcaggggcagggtgataaattgttgataaattccactggacttgagcttggcagctgaactattggagggtgggagagcccagccattaccatggagacaagaagggttttccaccctggaatcaagatgtcagactggctggctgcagtgacgtgcacctgtactcaggaggctgaggggaggatcactggagcccaggagtttgaggctgcagcgagctatgatcgcgccactacactccagcctgagcaacagagtgagaccctgtctcttaaagaaaaaaaaagtcagactgctgggactggccaggtttctgcccacattggacccacatgaggacatgatggagcgcacctgccccctggtggacagtcctgggagaacctcaggcttccttggcatcacagggcagagccgggaagcgatgaatttggagactctgtggggccttggttcccttgtgtgtgtgtgttgatcccaagacaatgaaagtttgcactgtatgctggacggcattcctgcttatcaataaacctgtttgttttaaaaaaaa

SEQ ID NO: 23 - DNA, 1532 bp, Homo sapiens
gaattcgggccgccgccaggtcgctgttggtccacgccgcccgtcgcgccgcccgcccgctcagcgtccgccgccgccatgggagtgcaggtggaaaccatctccccaggagacgggcgcaccttccccaagcgcggccagacctgcgtggtgcactacaccgggatgcttgaagatggaaagaaatttgattcctcccgggacagaaacaagccctttaagtttatgctaggcaagcaggaggtgatccgaggctgggaagaaggggttgcccagatgagtgtgggtcagagagccaaactgactatatctccagattatgcctatggtgccactgggcacccaggcatcatcccaccacatgccactctcgtcttcgatgtggagcttctaaaactggaatgacaggaatggcctcctcccttagctccctgttcttggatctgccatggagggatctggtgcctccagacatgtgcacatgagtccatatggagcttttcctgatgttccactccactttgtatagacatctgccctgactgaatgtgttctgtcactcagctttgcttccgacacctctgtttcctcttcccctttctcctcgtatgtgtgtttacctaaactatatgccataaacctcaagttattcattttattttgttttcattttggggtgaagattcagtttcagtcttttggatataggtttccaattaagtacatggtcaagtattaacagcacaagtggtaggttaacattagaataggaattggtgttggggggggggtttgcaagaatattttattttaattttttggatgaaatttttatctattatatattaaacattcttgctgctgcgctgcaaagccatagcagatttgaggcgctgttgaggactgaattactctccaagttgagagatgtctttgggttaaattaaaagccctacctaaaactgaggtggggatggggagagcctttgcctccaccattcccacccaccctccccttaaaccctctgcctttgaaagtagatcatgttcactgcaatgctggacactacaggtatctgtccctgggccagcagggacctctgaagccttctttgtggccttttttttttttcatcctgtggtttttctaatggactttcaggaattttgtaatctcataactttccaagctccaccacttcctaaatcttaagaactttaattgacagtttcaattgaaggtgctgtttgtagacttaacacccagtgaaagcccagccatcatgacaaatccttgaatgttctcttaagaaaatgatgctggtcatcgcagcttcagcatctcctgttttttgatgcttggctccctctgctgatctcagtttcctggcttttcctccctcagccccttctcacccctttgctgtcctgtgtagtgatttggtgagaaatcgttgctgcacccttcccccagcaccatttatgagtctcaagttttattattgcaataaaagtgctttatgcccgaattc

SEQ ID NO: 24 - DNA, 5086 bp, Homo sapiens
  modified_base (27): a, t, c, g, other or unknown
  modified_base (46): a, t, c, g, other or unknown
agcaccacggcagcaggaggtttcggnctaagttggaggtactggnccacgactgcatgcccgcgcccgccaggtgatacctccgccggtgacccaggggctctgcgacacaaggagtctgcatgtctaagtgctagacatgctcagctttgtggatacgcggactttgttgctgcttgcagtaaccttatgcctagcaacatgccaatctttacaagaggaaactgtaagaaagggcccagccggagatagaggaccacgtggagaaaggggtccaccaggccccccaggcagagatggtgaagatggtcccacaggccctcctggtccacctggtcctcctggcccccctggtctcggtgggaactttgctgctcagtatgatggaaaaggagttggacttggccctggaccaatgggcttaatgggacctagaggcccacctggtgcagctggagccccaggccctcaaggtttccaaggacctgctggtgagcctggtgaacctggtcaaactggtcctgcaggtgctcgtggtccagctggccctcctggcaaggctggtgaagatggtcaccctggaaaacccggacgacctggtgagagaggagttgttggaccacagggtgctcgtggtttccctggaactcctggacttcctggcttcaaaggcattaggggacacaatggtctggatggattgaagggacagcccggtgctcctggtgtgaagggtgaacctggtgcccctggtgaaaatggaactccaggtcaaacaggagcccgtgggcttcctggtgagagaggacgtgttggtgcccctggcccagctggtgcccgtggcagtgatggaagtgtgggtcccgtgggtcctgctggtcccattgggtctgctggccctccaggcttcccaggtgcccctggccccaagggtgaaattggagctgttggtaacgctggtcctgctggtcccgccggtccccgtggtgaagtgggtcttccaggcctctccggccccgttggacctcctggtaatcctggagcaaacggccttactggtgccaagggtgctgctggccttcccggcgttgctggggctcccggcctccctggaccccgcggtattcctggccctgttggtgctgccggtgctactggtgccagaggacttgttggtgagcctggtccagctggctccaaaggagagagcggtaacaagggtgagcccggctctgctgggccccaaggtcctcctggtcccagtggtgaagaaggaaagagaggccctaatggggaagctggatctgccggccctccaggacctcctgggctgagaggtagtcctggttctcgtggtcttcctggagctgatggcagagctggcgtcatgggccctcctggtagtcgtggtgcaagtggccctgctggagtccgaggacctaatggagatgctggtcgccctggggagcctggtctcatgggacccagaggtcttcctggttcccctggaaatatcggccccgctggaaaagaaggtcctgtcggcctccctggcatcgacggcaggcctggcccaattggcccagctggagcaagaggagagcctggcaacattggattccctggacccaaaggccccactggtgatcctggcaaaaacggtgataaaggtcatgctggtcttgctggtgctcggggtgctccaggtcctgatggaaacaatggtgctcagggacctcctggaccacagggtgttcaaggtggaaaaggtgaacagggtcccgctggtcctccaggcttccagggtctgcctggcccctcaggtcccgctggtgaagttggcaaaccaggagaaaggggtctccatggtgagtttggtctccctggtcctgctggtccaagaggggaacgcggtcccccaggtgagagtggtgctgccggtcctactggtcctattggaagccgaggtccttctggacccccagggcctgatggaaacaagggtgaacctggtgtggttggtgctgtgggcactgctggtccatctggtcctagtggactcccaggagagaggggtgctgctggcatacctggaggcaagggagaaaagggtgaacctggtctcagaggtgaaattggtaaccctggcagagatggtgctcgtggtgctcatggtgctgtaggtgcccctggtcctgctggagccacaggtgaccggggcgaagctggggctgctggtcctgctggtcctgctggtcctcggggaagccctggtgaacgtggcgaggtcggtcctgctggccccaacggatttgctggtccggctggtgctgctggtcaaccgggtgctaaaggagaaagaggagccaaagggcctaagggtgaaaacggtgttgttggtcccacaggccccgttggagctgctggcccagctggtccaaatggtccccccggtcctgctggaagtcgtggtgatggaggcccccctggtatgactggtttccctggtgctgctggacggactggtcccccaggaccctctggtatttctggccctcctggtccccctggtcctgctgggaaagaagggcttcgtggtcctcgtggtgaccaaggtccagttggccgaactggagaagtaggtgcagttggtccccctggcttcgctggtgagaagggtccctctggagaggctggtactgctggacctcctggcactccaggtcctcagggtcttcttggtgctcctggtattctgggtctccctggctcgagaggtgaacgtggtctacctggtgttgctggtgctgtgggtgaacctggtcctcttggcattgccggccctcctggggcccgtggtcctcctggtgctgtgggtagtcctggagtcaacggtgctcctggtgaagctggtcgtgatggcaaccctgggaacgatggtcccccaggtcgcgatggtcaacccggacacaagggagagcgcggttaccctggcaatattggtcccgttggtgctgcaggtgcacctggtcctcatggccccgtgggtcctgctggcaaacatggaaaccgtggtgaaactggtccttctggtcctgttggtcctgctggtgctgttggcccaagaggtcctagtggcccacaaggcattcgtggcgataagggagagcccggtgaaaaggggcccagaggtcttcctggcttaaagggacacaatggattgcaaggtctgcctggtatcgctggtcaccatggtgatcaaggtgctcctggctccgtgggtcctgctggtcctaggggccctgctggtccttctggccctgctggaaaagatggtcgcactggacatcctggtacggttggacctgctggcattcgaggccctcagggtcaccaaggccctgctggcccccctggtccccctggccctcctggacctccaggtgtaagcggtggtggttatgactttggttacgatggagacttctacagggctgaccagcctcgctcagcaccttctctcagacccaaggactatgaagttgatgctactctgaagtctctcaacaaccagattgagacccttcttactcctgaaggctctagaaagaacccagctcgcacatgccgtgacttgagactcagccacccagagtggagcagtggttactactggattgaccctaaccaaggatgcactatggatgctatcaaagtatactgtgatttctctactggcgaaacctgtatccgggcccaacctgaaaacatcccagccaagaactggtataggagctccaaggacaagaaacacgtctggctaggagaaactatcaatgctggcagccagtttgaatataatgtagaaggagtgacttccaaggaaatggctacccaacttgccttcatgcgcctgctggccaactatgcctctcagaacatcacctaccactgcaagaacagcattgcatacatggatgaggagactggcaacctgaaaaaggctgtcattctacagggctctaatgatgttgaacttgttgctgagggcaacagcaggttcacttacactgttcttgtagatggctgctctaaaaagacaaatgaatggggaaagacaatcattgaatacaaaacaaataagccatcacgcctgcccttccttgatattgcacctttggacatcggtggtgctgaccatgaattctttgtggacattggcccagtctgtttcaaataaatgaactcaatctaaattaaaaaagaaagaaatttgaaaaaactttctctttgccatttcttcttcttcttttttaactgaaagctgaatccttccatttcttctgcacatctacttgcttaaattgtgggcaaaagagaaaaagaaggattgatcagagcattgtgcaatacagtttcattaactccttcccccgctcccccaaaaatttgaatttttttttcaacactcttacacctgttatggaaaatgtcaacctttgtaagaaaaccaaaataaaaattgaaaaataaaaaccataaacatttgcaccacttgtggcttttgaatatcttccacagagggaagtttaaaacccaaacttccaaaggtttaaactacctcaaaacactttcccatgagtgtgatccacattgttaggtgctgacctagacagagatgaactgaggtccttgttttgttttgttcataatacaaaggtgctaattaatagtatttcagatacttgaagaatgttgatggtgctagaagaatttgagaagaaatactcctgtattgagttgtatcgtgtggtgtattttttaaaaaatttgatttagcattcatattttccatcttattcccaattaaaagtatgcagattatttgcccaaagttgtcctcttcttcagattcagcatttgttctttgccagtctcattttcatcttcttccatggttccacagaagctttgtttcttgggcaagcagaaaaattaaattgtacctattttgtatatgtgagatgtttaaataaattgtgaaaaaaatgaaataaagcatgtttggttttccaaaagaacatat

SEQ ID NO: 25 - DNA, 2038 bp, Homo sapiens
ggctataagcgcacggcctcggcgaccctctccgacccggccgccgccgccatgcagccctccagccttctgccgctcgccctctgcctgctggctgcacccgcctccgcgctcgtcaggatcccgctgcacaagttcacgtccatccgccggaccatgtcggaggttgggggctctgtggaggacctgattgccaaaggccccgtctcaaagtactcccaggcggtgccagccgtgaccgaggggcccattcccgaggtgctcaagaactacatggacgcccagtactacggggagattggcatcgggacgcccccccagtgcttcacagtcgtcttcgacacgggctcctccaacctgtgggtcccctccatccactgcaaactgctggacatcgcttgctggatccaccacaagtacaacagcgacaagtccagcacctacgtgaagaatggtacctcgtttgacatccactatggctcgggcagcctctccgggtacctgagccaggacactgtgtcggtgccctgccagtcagcgtcgtcagcctctgccctgggcggtgtcaaagtggagaggcaggtctttggggaggccaccaagcagccaggcatcaccttcatcgcagccaagttcgatggcatcctgggcatggcctacccccgcatctccgtcaacaacgtgctgcccgtcttcgacaacctgatgcagcagaagctggtggaccagaacatcttctccttctacctgagcagggacccagatgcgcagcctgggggtgagctgatgctgggtggcacagactccaagtattacaagggttctctgtcctacctgaatgtcacccgcaaggcctactggcaggtccacctggaccaggtggaggtggccagcgggctgaccctgtgcaaggagggctgtgaggccattgtggacacaggcacttccctcatggtgggcccggtggatgaggtgcgcgagctgcagaaggccatcggggccgtgccgctgattcagggcgagtacatgatcccctgtgagaaggtgtccaccctgcccgcgatcacactgaagctgggaggcaaaggctacaagctgtccccagaggactacacgctcaaggtgtcgcaggccgggaagaccctctgcctgagcggcttcatgggcatggacatcccgccacccagcgggccactctggatcctgggcgacgtcttcatcggccgctactacactgtgtttgaccgtgacaacaacagggtgggcttcgccgaggctgcccgcctctagttcccaaggcgtccgcgcgccagcacagaaacagaggagagtcccagagcaggaggcccctggcccagcggcccctcccacacacacccacacactcgcccgcccactgtcctgggcgccctggaagccggcggcccaagcccgacttgctgttttgttctgtggttttcccctccctgggttcagaaatgctgcctgcctgtctgtctctccatctgtttggtgggggtagagctgatccagagcacagatctgtttcgtgcattggaagaccccacccaagcttggcagccgagctcgtgtatcctggggctcccttcatctccagggagtcccctccccggccctaccagcgcccgctgggctgagcccctaccccacaccaggccgtcctcccgggccctcccttggaaacctgccctgcctgagggcccctctgcccagcttgggcccagctgggctctgccaccctacctgttcagtgtcccgggcccgttgaggatgaggccgctagaggcctgaggatgagctggaaggagtgagaggggacaaaacccaccttgttggagcctgcagggtggtgctgggactgagccagtcccaggggcatgtattggcctggaggtggggttgggattgggggctggtgccagccttcctctgcagctgacctctgttgtcctccccttgggcggctgagagccccagctgacatggaaatacagttgttggcctccggcctcccctc

SEQ ID NO: 26 - DNA, 557 bp, Homo sapiens
gccattatcctactccaagatcaagcatttgcgttgtggatggcaatcgcatctcagaaaccagtcttccaccggatatgtatgaatgtctacgtgttgctaacgaagtcactcttaattaatatctgtatcctggaacaatattttatggttatgtttttctgtgtgtcagttttcatagtatccatattttattactgtttattacttccatgaattttaaaatctgagggaaatgttttgtaaacatttattttttttaaagaaaagatgaaaggcaggcctatttcatcacaagaacacacacatatacacgaatagacatcaaactcaatgctttatttgtaaatttagtgtttttttatttctactgtcaaatgatgtgcaaaaccttttactggttgcatggaaatcagccaagttttataatccttaaatcttaatgttcctcaaagcttggattaaatacatatggatgttactctcttgcaccaaattatcttgatacattcaaatttgtctggttaaaaaataggtggtagatattgaggccaaga

SEQ ID NO: 27 - DNA, 1011 bp, Homo sapiens
cgcctgccaccggtgcacccagtccgctcacccagcccagtccgtccggtcctcaccgcctgccggccggcccaccccccaccgcagccatggacgccatcaagaagaagatgcagatgctgaagctggacaaggagaacgccatcgaccgcgccgagcaggccgaagccgacaagaagcaagctgaggaccgctgcaagcagctggaggaggagcagcaggccctccagaagaagctgaaggggacagaggatgaggtggaaaagtattctgaatccgtgaaggaggcccaggagaaactggagcaggccgagaagaaggccactgatgctgaggcagatgtggcctccctgaaccgccgcattcagctggttgaggaggagctggaccgggcccaggagcgcctggctacagccctgcagaagctggaggaggccgagaaggcggctgatgagagcgagagaggaatgaaggtcatcgaaaaccgggccatgaaggatgaggagaagatggaactgcaggagatgcagctgaaggaggccaagcacatcgctgaggattcagaccgcaaatatgaagaggtggccaggaagctggtgatcctggaaggagagctggagcgctcggaggagagggctgaggtggccgagagccgagccagacagctggaggaggaacttcgaaccatggaccaggccctcaagtccctgatggcctcagaggaggagtattccaccaaagaagataaatatgaagaggagatcaaactgttggaggagaagctgaaggaggctgagacccgagcagagtttgccgagaggtctgtggcaaagttggagaaaaccatcgatgacctagaagagaccttggccagtgccaaggaggagaacgtcgagattcaccagaccttggaccagaccctgctggaactcaacaacctgtgagggccagccccacccccagccaggctatggttgccaccccaacccaataaaactgatgttactagcc

SEQ ID NO: 28 - DNA, 5570 bp, Homo sapiens
ggcccctcagccctgctgcccagcacgagcctgtgctcgccctgcccaacgcagacagccagacccagggcggcccctctggcggctctgctcctcccgaaggatgcttggggagtgaggcgaagctgggcgctcctctcccctacagcagcccccttcctccatccctctgttctcctgagccttcaggagcctgcaccagtcctgcctgtccttctactcagctgttacccactctgggaccagcagtctttctgataactgggagagggcagtaaggaggacttcctggagggggtgactgtccagagcctggaactgtgcccacaccagaagccatcagcagcaaggacaccatgcggcttccgggtgcgatgccagctctggccctcaaaggcgagctgctgttgctgtctctcctgttacttctggaaccacagatctctcagggcctggtcgtcacacccccggggccagagcttgtcctcaatgtctccagcaccttcgttctgacctgctcgggttcagctccggtggtgtgggaacggatgtcccaggagcccccacaggaaatggccaaggcccaggatggcaccttctccagcgtgctcacactgaccaacctcactgggctagacacgggagaatacttttgcacccacaatgactcccgtggactggagaccgatgagcggaaacggctctacatctttgtgccagatcccaccgtgggcttcctccctaatgatgccgaggaactattcatctttctcacggaaataactgagatcaccattccatgccgagtaacagacccacagctggtggtgacactgcacgagaagaaaggggacgttgcactgcctgtcccctatgatcaccaacgtggcttttctggtatctttgaggacagaagctacatctgcaaaaccaccattggggacagggaggtggattctgatgcctactatgtctacagactccaggtgtcatccatcaacgtctctgtgaacgcagtgcagactgtggtccgccagggtgagaacatcaccctcatgtgcattgtgatcgggaatgaggtggtcaacttcgagtggacatacccccgcaaagaaagtgggcggctggtggagccggtgactgacttcctcttggatatgccttaccacatccgctccatcctgcacatccccagtgccgagttagaagactcggggacctacacctgcaatgtgacggagagtgtgaatgaccatcaggatgaaaaggccatcaacatcaccgtggttgagagcggctacgtgcggctcctgggagaggtgggcacactacaatttgctgagctgcatcggagccggacactgcaggtagtgttcgaggcctacccaccgcccactgtcctgtggttcaaagacaaccgcaccctgggcgactccagcgctggcgaaatcgccctgtccacgcgcaacgtgtcggagacccggtatgtgtcagagctgacactggttcgcgtgaaggtggcagaggctggccactacaccatgcgggccttccatgaggatgctgaggtccagctctccttccagctacagatcaatgtccctgtccgagtgctggagctaagtgagagccaccctgacagtggggaacagacagtccgctgtcgtggccggggcatgccccagccgaacatcatctggtctgcctgcagagacctcaaaaggtgtccacgtgagctgccgcccacgctgctggggaacagttccgaagaggagagccagctggagactaacgtgacgtactgggaggaggagcaggagtttgaggtggtgagcacactgcgtctgcagcacgtggatcggccactgtcggtgcgctgcacgctgcgcaacgctgtgggccaggacacgcaggaggtcatcgtggtgccacactccttgccctttaaggtggtggtgatctcagccatcctggccctggtggtgctcaccatcatctcccttatcatcctcatcatgctttggcagaagaagccacgttacgagatccgatggaaggtgattgagtctgtgagctctgacggccatgagtacatctacgtggaccccatgcagctgccctatgactccacgtgggagctgccgcgggaccagcttgtgctgggacgcaccctcggctctggggcctttgggcaggtggtggaggccacggctcatggcctgagccattctcaggccacgatgaaagtggccgtcaagatgcttaaatccacagcccgcagcagtgagaagcaagcccttatgtcggagctgaagatcatgagtcaccttgggccccacctgaacgtggtcaacctgttgggggcctgcaccaaaggaggacccatctatatcatcactgagtactgccgctacggagacctggtggactacctgcaccgcaacaaacacaccttcctgcagcaccactccgacaagcgccgcccgcccagcgcggagctctacagcaatgctctgcccgttgggctccccctgcccagccatgtgtccttgaccggggagagcgacggtggctacatggacatgagcaaggacgagtcggtggactatgtgcccatgctggacatgaaaggagacgtcaaatatgcagacatcgagtcctccaactacatggccccttacgataactacgttccctctgcccctgagaggacctgccgagcaactttgatcaacgagtctccagtgctaagctacatggacctcgtgggcttcagctaccaggtggccaatggcatggagtttctggcctccaagaactgcgtccacagagacctggcggctaggaacgtgctcatctgtgaaggcaagctggtcaagatctgtgactttggcctggctcgagacatcatgcgggactcgaattacatctccaaaggcagcacctttttgcctttaaagtggatggctccggagagcatcttcaacagcctctacaccaccctgagcgacgtgtggtccttcgggatcctgctctgggagatcttcaccttgggtggcaccccttacccagagctgcccatgaacgagcagttctacaatgccatcaaacggggttaccgcatggcccagcctgcccatgcctccgacgagatctatgagatcatgcagaagtgctgggaagagaagtttgagattcggccccccttctcccagctggtgctgcttctcgagagactgttgggcgaaggttacaaaaagaagtaccagcaggtggatgaggagtttctgaggagtgaccacccagccatccttcggtcccaggcccgcttgcctgggttccatggcctccgatctcccctggacaccagctccgtcctctatactgccgtgcagcccaatgagggtgacaacgactatatcatccccctgcctgaccccaaacccgaggttgctgacgagggcccactggagggttcccccagcctagccagctccaccctgaatgaagtcaacacctcctcaaccatctcctgtgacagccccctggagccccaggacgaaccagagccagagccccagcttgagctccaggtggagccggagccagagctggaacagttgccggattcggggtgccctgcgcctcgggcggaagcagaggatagcttcctgtagggggctggcccctaccctgccctgcctgaagctccccccctgccagcacccagcatctcctggcctggcctgaccgggcttcctgtcagccaggctgcccttatcagctgtccccttctggaagctttctgctcctgacgtgttgtgccccaaaccctggggctggcttaggaggcaagaaaactgcaggggccgtgaccagccctctgcctccagggaggccaactgactctgagccagggttcccccagggaactcagttttcccatatgtaagatgggaaagttaggcttgatgacccagaatctaggattctctccctggctgacaggtggggagaccgaatccctccctgggaagattcttggagttactgaggtggtaaattaacttttttctgttcagccagctacccctcaaggaatcatagctctctcctcgcactttttatccacccaggagctagggaagagaccctagcctccctggctgctggctgagctagggcctagccttgagcagtgttgcctcatccagaagaaagccagtctcctccctatgatgccagtccctgcgttccctggcccgagctggtctggggccattaggcagcctaattaatgctggaggctgagccaagtacaggacacccccagcctgcagcccttgcccagggcacttggagcacacgcagccatagcaagtgcctgtgtccctgtccttcaggcccatcagtcctggggctttttctttatcaccctcagtcttaatccatccaccagagtctagaaggccagacgggccccgcatctgtgatgagaatgtaaatgtgccagtgtggagtggccacgtgtgtgtgccagtatatggccctggctctgcattggacctgctatgaggctttggaggaatccctcaccctctctgggcctcagtttccccttcaaaaaatgaataagtcggacttattaactctgagtgccttgccagcactaacattctagagtattccaggtggttgcacatttgtccagatgaagcaaggccatataccctaaacttccatcctgggggtcagctgggctcctgggagattccagatcacacatcacactctggggactcaggaaccatgccccttccccaggcccccagcaagtctcaagaacacagctgcacaggccttgacttagagtgacagccggtgtcctggaaagccccaagcagctgccccagggacatgggaagaccacgggacctctttcactacccacgatgacctccgggggtatcctgggcaaaagggacaaagagggcaaatgagatcacctcctgcagcccaccactccagcacctgtgccgaggtctgcgtcgaagacagaatggacagtgaggacagttatgtcttgtaaaagacaagaagcttcagatggtaccccaagaaggatgtgagaggtggccgcttggagtttgcccctcacccaccagctgccccatccctgaggcagcgctccatgggggtatggttttgtcactgcccagacctagcagtgacatctcattgtccccagcccagtgggcattggaggtgccaggggagtcagggttgtagccaagacgcccccgcacggggagggttgggaagggggtgcaggaagctcaacccctctgggcaccaaccctgcattgcaggttggcaccttacttccctgggatccccagagttggtccaaggagggagagtgggttctcaatacggtaccaaagatataatcacctaggtttacaaatatttttaggactcacgttaactcacatttatacagcagaaatgctattttgtatgctgttaagtttttctatctgtgtacttttttttaagggaaagatttt

SEQ ID NO: 29 - DNA, 548 bp, Homo sapiens
  modified_base (327): a, t, c, g, other or unknown
  modified_base (348): a, t, c, g, other or unknown
  modified_base (368): a, t, c, g, other or unknown
  modified_base (502): a, t, c, g, other or unknown
  modified_base (506): a, t, c, g, other or unknown
  modified_base (522): a, t, c, g, other or unknown
acaagagatggggaaggaaaaggaccagactgtactgtggccatgtacacaaaggcatgcaccacatcccagctctgctgccctgggctgtcccacaggcagctctctagaacttgagagcctcaaaaggggcctcatgaagcccagatcttccctggtcaagctgatggcattcgtataactgaaagttggggaagaccaccaggtcagtggagtggagaggttttgtatatggtcttctttgaagaaacttacttcttgcaagccctggcatcttccaattggctgtcctagtagtggacgtggcatcagcctaccagcaatggnggtctactcacccttcactgngttttgtccctgaagtcagaagccctggcacagccaagttcacaggccaaatcacacttcaggcccacactgcttcacgcaatgacacacgtacagacggatatacagaaacacttctcnaggagtgcatgagcatggttcatttcatatttcnttcnatccagtctttaaaangcagcaccttggtgaaagcagtggag

SEQ ID NO: 30 - DNA, 2814 bp, Homo sapiens
aagaacgcccccaaaatctgtttctaattttacagaaatcttttgaaacttggcacggtattcaaaagtccgtggaaagaaaaaaaccttgtcctggcttcagcttccaactacaaagacagacttggtccttttcaacggttttcacagatccagtgacccacgctctgaagacagaattagctaactttcaaaaacatctggaaaaatgaagacttgggtaaaaatcgtatttggagttgccacctctgctgtgcttgccttattggtgatgtgcattgtcttacgcccttcaagagttcataactctgaagaaaatacaatgagagcactcacactgaaggatattttaaatggaacattttcttataaaacattttttccaaactggatttcaggacaagaatatcttcatcaatctgcagataacaatatagtactttataatattgaaacaggacaatcatataccattttgagtaatagaaccatgaaaagtgtgaatgcttcaaattacggcttatcacctgatcggcaatttgtatatctagaaagtgattattcaaagctttggagatactcttacacagcaacatattacatctatgaccttagcaatggagaatttgtaagaggaaatgagcttcctcgtccaattcagtatttatgctggtcgcctgttgggagtaaattagcatatgtctatcaaaacaatatctatttgaaacaaagaccaggagatccaccttttcaaataacatttaatggaagagaaaataaaatatttaatggaatcccagactgggtttatgaagaggaaatgcttcctacaaaatatgctctctggtggtctcctaatggaaaatttttggcatatgcggaatttaatgataaggatataccagttattgcctattcctattatggcgatgaacaatatcctagaacaataaatattccatacccaaaggctggagctaagaatcccgttgttcggatatttattatcgataccacttaccctgcgtatgtaggtccccaggaagtgcctgttccagcaatgatagcctcaagtgattattatttcagttggctcacgtgggttactgatgaacgagtatgtttgcagtggctaaaaagagtccagaatgtttcggtcctgtctatatgtgacttcagggaagactggcagacatgggattgtccaaagacccaggagcatatagaagaaagcagaactggatgggctggtggattctttgtttcaagaccagttttcagctatgatgccatttcgtactacaaaatatttagtgacaaggatggctacaaacatattcactatatcaaagacactgtggaaaatgctattcaaattacaagtggcaagtgggaggccataaatatattcagagtaacacaggattcactgttttattctagcaatgaatttgaagaataccctggaagaagaaacatctacagaattagcattggaagctatcctccaagcaagaagtgtgttacttgccatctaaggaaagaaaggtgccaatattacacagcaagtttcagcgactacgccaagtactatgcacttgtctgctacggcccaggcatccccatttccacccttcatgatggacgcactgatcaagaaattaaaatcctggaagaaaacaaggaattggaaaatgctttgaaaaatatccagctgcctaaagaggaaattaagaaacttgaagtagatgaaattactttatggtacaagatgattcttcctcctcaatttgacagatcaaagaagtatcccttgctaattcaagtgtatggtggtccctgcagtcagagtgtaaggtctgtatttgctgttaattggatatcttatcttgcaagtaaggaagggatggtcattgccttggtggatggtcgaggaacagctttccaaggtgacaaactcctctatgcagtgtatcgaaagctgggtgtttatgaagttgaagaccagattacagctgtcagaaaattcatagaaatgggtttcattgatgaaaaaagaatagccatatggggctggtcctatggaggatacgtttcatcactggcccttgcatctggaactggtcttttcaaatgtggtatagcagtggctccagtctccagctgggaatattacgcgtctgtctacacagagagattcatgggtctcccaacaaaggatgataatcttgagcactataagaattcaactgtgatggcaagagcagaatatttcagaaatgtagactatcttctcatccacggaacagcagatgataatgtgcactttcaaaactcagcacagattgctaaagctctggttaatgcacaagtggatttccaggcaatgtggtactctgaccagaaccacggcttatccggcctgtccacgaaccacttatacacccacatgacccacttcctaaagcagtgtttctctttgtcagactaaaaacgatgcagatgcaagcctgtatcagaatctgaaaaccttatataaacccctcagacagtttgcttattttattttttatgttgtaaaatgctagtataaacaaacaaattaatgttgttctaaaggctgttaaaaaaaagatgaggactcagaagttcaagctaaatattgtttacattttctggtactctgtgaaagaagagaaaagggagtcatgcattttgctttggacacagtgttttatcacctgttcatttgaagaaaaataataaagtcagaagttcaaaaaaaaaaaaaaaaaaaaaaaaagcggccgctcg

SEQ ID NO: 31 - DNA, 581 bp, Homo sapiens
aattttgttcaccgagatctggccacacgaaactgtttagtgggtaagaactacacaatcaagatagctgactttggaatgagcaggaacctgtacagtggtgactattaccggatccagggccgggcagtgctccctatccgctggatgtcttgggagagtatcttgctgggcaagttcactacagcaagtgatgtgtgggcctttggggttactttgtgggagactttcaccttttgtcaagaacagccctattcccagctgtcagatgaacaggttattgagaatactggagagttcttccgagaccaagggaggcagacttacctccctcaaccagccatttgtcctgactctgtgtataagctgatgctcagctgctggagaagagatacgaagaaccgtccctcattccaagaaatccaccttctgctccttcaacaaggcgacgagtgatgctgtcagtgcctggccatgttcctacggctcaggtcctccctacaagacctaccactcacccatgcctatgccactccatctggacatttaatgaaactgagagacagaggcttgtttgcttg

SEQ ID NO: 32 - DNA, 587 bp, Homo sapiens
tttttttttttttttttttttctcgctcacatataaaatgtaattccttcatttttacatttatacatccggcggggccagggaagggctggctggggaggggctcactgaaggacttcaccggcaggtgcaggaggctttctgggggcagtccgacggggcagggctcatgccaaggggtcccctatctcgtcctcagggccccggcacggagtttctcgcttctcgtccgtgctggccagggagtgggtactgcatggccccccatgtagagtgtggcatacacggggttggtgaagttggtgggcttgtcagggtccagggcaaagtcagcgtccagtaggcctcccacatcatcaggctctccgccttcgtacatcttgtaggtggggtttccaatctccacgttcatggccccgttggtcatccgttggtgctggaacccttgagccccttggactcgccgcttataccagaataccactccggccaccagaacccagcagcagagcaacagcagagggattaagaatggaggccatatgtcccggttgctgctggcttaaaaactgcttctcaaaacggga

SEQ ID NO: 33 - DNA, 257 bp, Homo sapiens
cgactcctgcccggccctaccccgagctgatctcccgtccctcgcccccgaccatgcgctggttcctgccggacttgcctccttcccgcagcgccgtagagatcgctcccactcaggtcacagagactgatgagtgccgactgaaccagaacatctgtggccacggagagtgcgtgccgggcccccctgactactcctgccactgcaaccccggctaccggtcacatccccagcaccgctactgcgtggatgtgaac

SEQ ID NO: 34 - DNA, 431 bp, Homo sapiens
ttttttacctatccctggagcaagtaataggaagagaatgggcaaactggttgcacgagagaaaagagaatggagttgggagcaacacatgaacttgcgttataacattctgctgtccagatctgccctactgtgctggtggtcggtctgtccctcttctcattagccactcacaggagaggtgcttgtgcactctgattcacaggggatgaactcaggatctcaaaagacatacaaaaactagaggtatgtatcacttaaatagctacgaaactcacaccgtgatctcccttctgacacacatctgcgccatctcttccaacataaaataaactgtttcaatggtttgtcagttatttttcaaatcactaaaatgtacagtcatccaccaacaatttaagaaagaacctaagaggcaaatcactggggac

SEQ ID NO: 35 - DNA, 800 bp, Homo sapiens
cgagcggactcgactcggcaccgctgtgcaccatggcccgggccctgtgccgcctcccgcggcgcggcctctggctgctcctggcccatcacctcttcatgaccactgcctgccaggaggctaactacggtgccctcctccgggagctctgcctcacccagttccaggtagacatggaggccgtcggggagacgctgtggtgtgactggggcaggaccatcaggagctacagggagctggccgactgcacctggcacatggcggagaagctgggctgcttctggcccaatgcagaggtggacaggttcttcctggcagtgcatggccgctacttcaggagctgccccatctcaggcagggccgtgcgggacccgcccggcagcatcctctaccccttcatcgtggtccccatcacggtgaccctgctggtgacggcactggtggtctggcagagcaagcgcactgagggcattgtgtaggcggggcccaggctgcccgcgggtgcacccaggctgcagggtgaggccaggcaggcctgggtaggggcagcttctggagccttgggacagagcaggcccacaatgccccccttcttccagccaagaagagctcacaggagtccagagtagccgaggctctggtattaacctggaagcccccctggctggaggccaccgccaccctaggaagggggcagggacgtgaccttgacttacctctggaaagggtcccagcctagactgcttaccccatagccacatttgtggatgagtggtttgtgattaaaagggatgttcttg

SEQ ID NO: 36 - DNA, 250 bp, Homo sapiens
  modified_base (239): a, t, c, g, other or unknown
acattctgcaatggcagcattcccaccaacaaaatccatgtgaccattctgcctctcctcaggagaaagtaccctcttttaccaacttcctctgccatgtttttcccctgctcccctgagaccacccccaaacacaaaacattcatgtaactctccagccattgtaatttgaagatgtggatccctttagaacggttgccccagtagagttagctgataagggaactttatttaaatgnatgtcttaaat

SEQ ID NO: 37 - DNA, 404 bp, Homo sapiens
ttttcaaagttacaatagtttaataatttaaataggaccaacttcaggaacatacatactcatacataaaattaaacaatttaattttgaacagtgtattgaaatacatcaaattcttaaaaatcccccaaatggactcaagatcatggatatgaaaaggtaattttgaagtactaaagactagagtaaaacagacaaagtcattactttgcatttactaataagacaacagcctgtggatacattagacctttataagaacacttctaggaaatgttagaacaacgagtcattaaaaaggaatataaatgagttcataaagataaatgtatagctgacaatttctttggtcctcgaagtcacacttgtttttactttaaaatgccaaacatgagttgagtgct

SEQ ID NO: 38 - DNA, 1480 bp, Homo sapiens
ggcaggagaatttgaaagggtgccccaaaggacaatctctaaaggggtaagggagatacctaccttgtctggtaggggagatgtttcgttttcatgctttaccagaaaatccacttccctgccgaccttagtttcaaagcttattcttaattagagacaagaaacctgtttcaacttgaagacaccgtatgaggtgaatggacagccagccaccacaatgaaagaaatcaaaccaggaataacctatgctgaacccacgcctcaatcgtccccaagtgtttcctgacacgcatctttgcttacagtgcatcacaactgaagaatggggttcaacttgacgcttgcaaaattaccaaataacgagctgcacggccaagagagtcacaattcaggcaacaggagcgacgggccaggaaagaacaccacccttcacaatgaatttgacacaattgtcttgccagtgctttatctcattatatttgtggcaagcatcttgctgaatggtttagcagtgtggatcttcttccacattaggaataaaaccagcttcatattctatctcaaaaacatagtggttgcagacctcataatgacgctgacatttccatttcgaatagtccatgatgcaggatttggaccttggtacttcaagtttattctctgcagatacacttcagttttgttttatgcaaacatgtatacttccatcgtgttccttgggctgataagcattgatcgctatctgaaggtggtcaagccatttggggactctcggatgtacagcataaccttcacgaaggttttatctgtttgtgtttgggtgatcatggctgttttgtctttgccaaacatcatcctgacaaatggtcagccaacagaggacaatatccatgactgctcaaaacttaaaagtcctttgggggtcaaatggcatacggcagtcacctatgtgaacagctgcttgtttgtggccgtgctggtgattctgatcggatgttacatagccatatccaggtacatccacaaatccagcaggcaattcataagtcagtcaagccgaaagcgaaaacataaccagagcatcagggttgttgtggctgtgttttttacctgctttctaccatatcacttgtgcagaattccttttacttttagtcacttagacaggcttttagatgaatctgcacaaaaaatcctatattactgcaaagaaattacacttttcttgtctgcgtgtaatgtttgcctggatccaataatttactttttcatgtgtaggtcattttcaagaaggctgttcaaaaaatcaaatatcagaaccaggagtgaaagcatcagatcactgcaaagtgtgagaagatcggaagttcgcatatattatgattacactgatgtgtaggccttttattgtttgttggaatcgatatgtacaaagtgtaaaaaaatgtttctttcattaaaaaaaaaaaaaaaaaaaaag

SEQ ID NO: 39 - DNA, 286 bp, Homo sapiens
ctcgcaggtctcaacatatgcactagtggaagtgccacctcatgtgaagaatgtctgctaatccacccaaaatgtgcctggtgctccaaagaggacttcggaagcccacggtccatcacctctcggtgtgatctgagggcaaaccttgtcaaaaatggctgtggaggtgagatagagagcccagccagcagcttccatgtcctgaggagcctgcccctcagcagcaagggttcgggctctgcaggctgggacgtcattcagatgacaccacaggagattgccgtga

SEQ ID NO: 40 - DNA, 318 bp, Homo sapiens
ggcgagcggactcgactcggcaccgctgtgcaccatggcccgggccctgtgccgcctcccgcggcgggcctctggctgctcctggcccatcacctcttcatgaccactgcctgccaggaggctaactacggtgccctcctccgggagctctgcctcacccagttccaggtagacatggaggccgtcggggagacgctgtggtgtgactggggcaggaccatcaggagctacagggagctggccgactgcacctggcacatggcggagaagctgggctgcttctggcccaatgcagaggtggacaggttcttcctggca

SEQ ID NO: 41 - DNA, 3222 bp, Homo sapiens
cctagcactgctcccccaaggctcccagaaatctcaggtcagaggcacggacagcctctggagctctcgtctggtgggaccatgaactgccagcagctgtggctgggcttcctactccccatgacagtctcaggccgggtcctggggcttgcagaggtggcgcccgtggactacctgtcacaatatgggtacctacagaagcctctagaaggatctaataacttcaagccagaagatatcaccgaggctctgagagcttttcaggaagcatctgaacttccagtctcaggtcagctggatgatgccacaagggcccgcatgaggcagcctcgttgtggcctagaggatcccttcaaccagaagacccttaaatacctgttgctgggccgctggagaaagaagcacctgactttccgcatcttgaacctgccctccacccttccaccccacacagcccgggcagccctgcgtcaagccttccaggactggagcaatgtggctcccttgaccttccaagaggtgcaggctggtgcggctgacatccgcctctccttccatggccgccaaagctcgtactgttccaatacttttgatgggcctgggagagtcctggcccatgccgacatcccagagctgggcagtgtgcacttcgacgaagacgagttctggactgaggggacctaccgtggggtgaacctgcgcatcattgcagcccatgaagtgggccatgctctggggcttgggcactcccgatattcccaggccctcatggccccagtctacgagggctaccggccccactttaagctgcacccagatgatgtggcagggatccaggctctctatggcaagaagagtccagtgataagggatgaggaagaagaagagacagagctgcccactgtgcccccagtgcccacagaacccagtcccatgccagacccttgcagtagtgaactggatgccatgatgctggggccccgtgggaagacctatgctttcaagggggactatgtgtggactgtatcagattcaggaccgggccccttgttccgagtgtctgccctttgggaggggctccccggaaacctggatgctgctgtctactcgcctcgaacacaatggattcacttctttaagggagacaaggtgtggcgctacattaatttcaagatgtctcctggcttccccaagaagctgaatagggtagaacctaacctggatgcagctctctattggcctctcaaccaaaaggtgttcctctttaagggctccgggtactggcagtgggacgagctagcccgaactgacttcagcagctaccccaaaccaatcaagggtttgtttacgggagtgccaaaccagccctcggctgctatgagttggcaagatggccgagtctacttcttcaagggcaaagtctactggcgcctcaaccagcagcttcgagtagagaaaggctatcccagaaatatttcccacaactggatgcactgtcgtccccggactatagacactaccccatcaggtgggaataccactccctcaggtacgggcataaccttggataccactctctcagccacagaaaccacgtttgaatactgactgctcacccacagacacaatcttggacattaacccctgaggctccaccacccaccctttcatttcccccccagaagcctaaggcctaatagctgaatgaaatacctgtctgctcagtagaaccttgcaggtgctgtagcaggcgcaagaccgtagatctcaggcctctaacacttccaactccagccaccactttcctgtgcattttcactcctgagaagtgctcccctaactcagatcccctaacttagatttggcccccaactccatttcctgtctgtcttagacagcccttccaactgtgtcatctcttctctggaggtcaatggtggagggagatgcctgggtcctgttcttcctacataaaatgcaagaaaacagcatggccagtaaactgagcaagggccttggaatccttgagaatcacatttatgtgcttatgattacgggcaagctaattaaccttgttgaatctcagattccccatttgcaacattaggttaagaccagtactgcaggattgttgcactaaatgaaatactgtatgtgaagtgcctggcacagtgtctggtacatttgtgtttaataaaagctaactccatgttcataagagaggactgaacagctcttcctctagctgtctggctgtataactcttacagtagtctgtataataagggcatctctattagatctttaggggacagaggatttgtcaagatggttagctctttgttttggggtgcagagaaagaaaagagcagcaacagcagaggctggactccctggttcagtatttaatgccattttattcacatgctcccatgttctccctccctcccattgtagccttgctgcccaggggagggatatgtcttcctttatgcatctgggaaaccaggaacagaccctgcgcaggagagtcagagggggaagagttagaatgggtcagtggctggaacaaagttctggttaaggaggaaattagtgccacccacggtgagaagcagagaaggcacttgcatcctatgcagccctgaagaccaggctcctttgggcaaaaggcaagactctggcaggtgggtcaatgctctctccttggagcaagaagccagcttttggggaaggcaggtcctgaggcaggcactgccctgtggtcttccccaggttgaggagagaagtggaagccccatggaagacagtgctcccagctgaggtaggaggcggaggtgggggtgggggtagtttaagcctatggggcccagggggaaaggccaaacagaaacccaactaccccctaatgaagggcctggaggttggggtatcttggagctcctcagagcccttcttcccatcaaaaaggtatcaaatgccttggaagctccctgatcctacaaaacaaaaaaatgcttatttttaccactgtgaggcaagctgaggtgaacatttaaaaggctatttcaagacgaggtgcggtggctataatcctagcactttgggaggctgaagcaggaggatcacttgagcccaggagttcaagaccagcttgggcaacatagggagaccctgtctctgcaaaaaaataaaaacgaatacataaaaattaaaaaaaaa

SEQ ID NO: 42 - DNA, 2832 bp, Homo sapiens
gcgagctgacagccgccgccgccgccgcctccgcccaccttcctcgccggggcttcgtctttcactccttcgggctgcctccccctccccttgtcccctgccccttgccctgcttctgcagaagatttcaacactacacttgcacaatgtctttgaaaccaagagtagtagattttgatgaaacatggaacaaacttttgacgacaataaaagccgtggtcatgttggaatacgtcgaaagagcaacatggaatgaccgtttctcagatatctatgctttatgtgtggcctatcctgaaccccttggagaaagactttatacagaaactaagatttttttggaaaatcatgttcggcatttgcataagagagttttggagtcagaagaacaagtacttgttatgtatcataggtactgggaagaatacagcaagggtgcagactatatggactgcttatataggtatctcagcacccagtttattaaaaagaataaattaacagaagcggaccttcagtatggctatggtggtgtagatatgaatgaaccacttatggaaataggagagctagcattggatatgtggaggaaattgatggttgaaccacttcaggccatccttatccgaatgctgctccgagaaatcaaaaatgatcgtggtggagaagacccaaaccagaaagtaatccatggggttattaactcctttgttcatgttgaacagtataagaaaaaattccccttaaagttttatcaggaaatttttgagtctccctttctgactgaaacaggagagtattacaaacaagaagcttcaaatttattacaagaatcaaactgctcacagtatatggaaaaggttttaggtagattaaaagatgaagaaattcgatgtcgaaaatacctacatccaagttcatatactaaggtgattcatgaatgtcaacaacgaatggtagcagaccacttacagtttttacatgcagaatgtcataatataattcgacaagagaaaaaaaatgacatggcaaatatgtacgtcttactccgtgctgtgtccactggtttacctcatatgattcaggagctgcaaaaccacatccatgatgagggccttcgagcaaccagcaaccttactcaggaaaacatgccaacactatttgtggagtcagttttggaagtgcatggtaaatttgttcagcttatcaacactgttttgaatggtgatcagcattttatgagtgcgttggataaggcccttacgtcagttgtaaattacagagaacctaagtctgtttgcaaagcacctgaactgcttgctaagtactgtgacaacttactgaagaagtcagcgaaagggatgacagagaatgaagtggaagacaggcttacgagcttcatcacagtgttcaaatacattgatgacaaggacgtctttcaaaagttctacgcaagaatgctggcaaaacgtttaattcatgggttatccatgtctatggactctgaagaagccatgatcaacaaattaaagcaagcctgtggttatgagtttaccagcaagctacatcggatgtatacagatatgagtgtcagcgctgatctcaacaataagttcaacaattttatcaaaaaccaagacacagtaatagatttgggaattagttttcaaatatatgttctacaggctggtgcgtggcctcttactcaggctccttcatctacgtttgcaattccccaggaattagaaaaaagtgtacagatgtttgaattattttatagccaacatttcagtggaaggaaacttacatggttacattatctgtgtacaggtgaagttaaaatgaactatttgggcaaaccatatgtagccatggttacaacataccaaatggcagttcttcttgcctttaacaacagtgaaactgtcagttataaagagcttcaggacagcactcagatgaatgaaaaggaactgacaaaaacaatcaaatcattacttgatgtgaaaatgattaaccatgattcagaaaaggaagatattgatgcagaatcttcgttttcattaaatatgaactttagcagtaaaagaacaaaatttaaaattactacatcaatgcagaaagacacaccacaagaaatggagcagactagaagtgcagttgatgaggaccggaaaatgtatctccaagctgctatagttcgtatcatgaaagcacgaaaagtgcttcggcacaatgcccttattcaagaggtgattagccagtcaagagctaggtttaatcccagtatcagcatgattaagaagtgtattgaagttctgatagacaaacaatacatagaacgcagccaggcgtcggcagatgaatacagctacgtcgcgtgatgtcgctctcctccagcgtggtgtgagaagatcattgccatcaccatttggtgtgttcctgtgggaaaaagcaggactgtgcctccataatttggtcatttggcagcccctgttttctgctgtttacaacatcaccagtgccacgtcatgagcgtcaaagaaaatgcctagagatatttcaagctcatgacattatgacatttcttaaaactttattaaaagaatgagtgaagtattgctgaaaagtggaaaatcggttgggtaccatgctttttctccccttcacgtttgcagttgatgtgtctttttttttttttttaatgtatcttaaaggacataaaatttaaaaacttaaatattgtaatatgacagataacctaataattgtatctacattaaaatgacaaacatgatactgctgcttgtcaaataaaaaaaaaaaaaaaaa

SEQ ID NO: 43 - DNA, 489 bp, Homo sapiens
  modified_base (57): a, t, c, g, other or unknown
  modified_base (167): a, t, c, g, other or unknown
  modified_base (245): a, t, c, g, other or unknown
  modified_base (268): a, t, c, g, other or unknown
  modified_base (306): a, t, c, g, other or unknown
  modified_base (388): a, t, c, g, other or unknown
  modified_base (443): a, t, c, g, other or unknown
  modified_base (462): a, t, c, g, other or unknown
  modified_base (472): a, t, c, g, other or unknown
  modified_base (477): a, t, c, g, other or unknown
  modified_base (488): a, t, c, g, other or unknown
ttttttttttttatatttatatttatatttatatatatgtatatatatatatatgtnatgtacaaaagactttgagatatcaggcaccattaaaccacatttccccccttataaatgcaactgttcaagtacactgggaacagttttaaggtacacctgcagtacantaggagaagcatgagtggataatctaaacacaggatcataacagtgatacgctgcaacacctctgtgaattccattanccaagttctgtcattaaaacatnggaaaactactggctcctcaaaataaaaggttttaggnaaccaaaaatcccctaagtagtgaactgttttccaagcagagctccctaatggttttcaatttcctgggcctacaaccaaanggggaccccagttggaagctgccgtttgggaaacgtgggccaggcatcagatcancaacacgggggggaatccngagaggggcncattnttgaagaaggng

SEQ ID NO: 44 - DNA, 250 bp, Homo sapiens
tttctccagctttgcccctgtgggtgatgctctaacagtgacctggaattttcgtcctctagacgggggacctgagcagtttgtattctactaccacatagatcccttccaacccatgagtgggcggtttaaggaccgggtgtcttgggatgggaatcctgagcggtacgatgcctccatccttctctggaaactgcagttcgacgacaatgggacatacacctgccaggtgaagaacccacctgatgtt

SEQ ID NO: 45 - DNA, 2094 bp, Homo sapiens
gaggatctacaggggacaagtaaaggctacatccagatgccgggaatgcactgacgcccattcctggaaactgggctcccactcagcccctgggagcagcagccgccagcccctcggacctccatctccaccctgctgagccacccgggttgggccaggatcccggcaggctgatcccgtcctccactgagacctgaaaaatggcttcggggcaaggcccaggtcctcccaggcaggagtgcggagagcctgccctgccctctgcttctgaggagcaggtagcccaggacacagaggaggttttccgcagctacgttttttaccgccatcagcaggaacaggaggctgaaggggtggctgcccctgccgacccagagatggtcaccttacctctgcaacctagcagcaccatggggcaggtgggacggcagctcgccatcatcggggacgacatcaaccgacgctatgactcagagttccagaccatgttgcagcacctgcagcccacggcagagaatgcctatgagtacttcaccaagattgccaccagcctgtttgagagtggcatcaattggggccgtgtggtggctcttctgggcttcggctaccgtctggccctacacgtctaccagcatggcctgactggcttcctaggccaggtgacccgcttcgtggtcgacttcatgctgcatcactgcattgcccggtggattgcacagaggggtggctgggtggcagccctgaacttgggcaatggtcccatcctgaacgtgctggtggttctgggtgtggttctgttgggccagtttgtggtacgaagattcttcaaatcatgactcccaagggtgccctttgggtcccggttcagacccctgcctggacttaagcgaagtctttgccttctctgttcccttgcagggtcccccctcaagagtacagaagctttagcaagtgtgcactccagcttcggaggccctgcgtgggggccagtcaggctgcagaggcacctcaacattgcatggtgctagtgccctctctctgggcccagggctgtggccgtctcctccctcagctctctgggacctccttagccctgtctgctaggcgctggggagactgataacttggggaggcaagagactgggagccacttctccccagaaagtgtttaacggttttagctttttataatacccttgtgagagcccattcccaccattctacctgaggccaggacgtctggggtgtggggattggtgggtctatgttccccaggattcagctattctggaagatcagcaccctaagagatgggactaggacctgagcctggtcctggccgtccctaagcatgtgtcccaggagcaggacctactaggagaggggggccaaggtcctgctcaactctacccctgctcccattcctccctccggccatactgcctttgcagttggactctcagggattctgggcttggggtgtggggtggggtggagtcgcagaccagagctgtctgaactcacgtgtcagaagcctccaagcctgcctcccaaggtcctctcagttctctcccttcctctctccttatagacacttgctcccaacccattcactacaggtgaaggctctcacccatccctgggggccttgggtgagtggcctgctaaggctcctccttgcccagactacagggcttaggacttggtttgttatatcagggaaaaggagtagggagttcatctggagggttctaagtgggagaaggactatcaacaccactaggaatcccagaggtggatcctccctcatggctctggcacagtgtaatccaggggtgtagatgggggaactgtgaatacttgaactctgttcccccaccctccatgctcctcacctgtctaggtctcctcagggtggggggtgacagtgccttctctattggcacagcctagggtcttgggggtcaggggggagaagttcttgattcagccaaatgcagggaggggaggcagatggagcccataggccaccccctatcctctgagtgtttggaaataaactgtgcaatcccctcaaaaaaaaaacggagatcc

SEQ ID NO: 46 - DNA, 464 bp, Homo sapiens
ggtgctgtttaaagtcacatccctgtaaattgcagaattcaaaagtgattatctctttgatctacttgcctcatttccctatcttctcccccacggtatcctaaactttagacttcccactgttctgaaaggagacattgctctatgtctgccttcgaccacagcaagccatcatcctccattgctcccggggactcaagaggaatctgtttctctgctgtcaacttcccatctggctcagcatagggtcactttgccattatgcaaatggagataaaagcaattctgactgtccaggagctaatctgaccgttctattgtgtggatgaccacataagaaggcaattttagtgtattaatcatagattattataaactataaacttaagggcaaggagtttattacaatgtatctttattaaaacaaaagggtgtatagtgttcacaaactgtgaaaatagtgt

SEQ ID NO: 47 - DNA, 337 bp, Homo sapiens
  modified_base (211): a, t, c, g, other or unknown
  modified_base (267): a, t, c, g, other or unknown
  modified_base (287): a, t, c, g, other or unknown
tttttcaacgcatctgtgttatttttattttctttgctttggtctatacaaaaaaaccaataaccaaaaacataaagcgataataataaaacactctgcttggacctcccccagccccccacaccatgtgcgggaaatgggggggtctgaaacaggaaggggaagagaaagcccctcaccacacaccagaggggtcagccaagagcacttntcggggtcagctaggggcagctgtgtggggtggggacaggggtttgagggaagctntccccagagctccctggggnagttgagggggtggggcaaagccaacttaaggcaccctggggagagagaa

SEQ ID NO: 48 - DNA, 224 bp, Homo sapiens
ccggccttggaacaactgtggaacctgaggccgcttgccctcccgccccatggagcggcccccggggctgcggccgggcgcgggcgggccctgggagatgcgggagcggctgggcaccggcggcttcgggaacgtctgtctgtaccagcatcgggaacttgatctcaaaatagcaattaagtcttgtcgcctagagctaagtaccaaaaacagagaacgatggt

SEQ ID NO: 49 - DNA, 573 bp, Homo sapiens
gttcaggatccccgctatctcagggctctctgggccagtcctcctgggagcccccaccacaacacttcccaggcatgagctctcaggcgccacatgagcttccacacactgagaagtgtccgagaaattggtggggcctctgaaggacgtgtgagcagccacctgaactcccagctcaccagcccaaacagggtgcaggggctctggcctgaagaacctgagtggagtggaatggcactggctggccactcagctcagcgggcgacgtgcccctacaagttggcagaagtggctgccactgctgggtttgtgtaagagaggctgctgcaccattacctgcagaaaccttctcataggggctacgatcggtactgctagggggcacatagcggccatgggtgtggtaggtggggtactcgctcataggatggtaagtatcccgggctggaaagatgtccagctgcccgtaattctttccgcggcacttacagacaggcaaggcaatgagatagacaatggccagcgcaccaggacaaagaccagcaccaacagcgcatggccccagcctggacc

SEQ ID NO: 50 - DNA, 2895 bp, Homo sapiens
cccgcctgacgactgaccagttgccatggcatcctactacgagatcctagacgtgccgcgaagtgcgtccgctgatgacatcaagaaggcgtatcggcgcaaggctctccagtggcacccagacaaaaacccagataataaagagtttgctgagaagaaatttaaggaggtggccgaggcatatgaagtgctgtctgacaagcacaagcgggagatttacgaccgctatggccgggaagggctgacagggacaggaactggcccatctcgggcagaagctggcagtggtgggcctggcttcaccttcaccttccgcagccccgaggaggtcttccgggaattctttgggagtggagacccttttgcagagctctttgatgacctgggccccttctcagagcttcagaaccggggttcccgacactcaggccccttctttaccttctcttcctccttccctgggcactccgatttctcctcctcatctttctccttcagtcctggggctggtgcttttcgctctgtttctacatctaccacctttgtccaaggacgccgcatcaccacacgcagaatcatggagaacgggcaggagcgggtggaagtggaggaggatgggcagctgaagtcagtcacaatcaatggtgtcccagatgacctggcacgtggcttggagctgagccgtcgcgagcagcagccgtcagtcacttccaggtctgggggcactcaggtccagcagacccctgcctcatgccccttggacagcgacctctctgaggatgaggacctgcagctggccatggcctacagcctgtcagagatggaggcagctgggaagaaacccgcaggtgggcgggaggcacagcaccgacggcaggggcgcccaaggcccagcaccaagatccaggcttgggggggacccaggagggtgcgaggggtgaagcaaccaaacgcagtccatccccagaggagaaggcctctcgctgcctcatcctctgaacaccgggcccaacctgatctgatccagatcttgactggggggtctgactcactgtgggaagagaagaggggagtatcctgagttgtaggaactgctttccaactccaagctccctccacaagtttccctccccaggccccccacaccccagtgtggacttgggatttgctgtgctcagcccagggctgataggtccctggtgaagcccagggtggggggtgtcagggcagtggaggggcccgaggagccaggttgcatttattggatggggagctccaaggggcattagtggtttgggctgggcttttgtgccctggtactctgccacctgtgttgctgatggtgtcaaggaaggaggacttggcctagggttgtctgagccggagccggcagctccactggagagcagtgcaggcagagtggagcctcctgctctcctggaccagctgcagacccccaaccctggtttctgtgccatgttgcgctctgaccgtctctgttgcttctcttctggtgttgcttctcctccctcccattctctctgcaactcctgcgggcgcatcgcttgctttcactgccgtctggctaggactcccttcttccttccttccccgagaaggcctcaatgtggcgaggaagatgctggggccggtagggctgtgagatcttctggggaggctagccgggtggggcgggagcctctcagctgtccagattcagaactggagcccactcctcctccctctcgttgcctcagccctgccctcaccctcagactaggcagaggtgaggctggctcaccctgaagaggtgggataggaggggactgcacccatactgcttccctaccacaaatcagggctcagggagaggccatgcggcagcccaggtctgcatgctgagccccatcctccacagcttgccgctgacgctctctcctgtcaccccgcccctgctctctccccagatgtgttctgagctggatgccgggttccagaatcgctgcacagttccaacaggacagcgccttcccccatgcgctgggaggggaccctccatttctccccctcacccatgctgagtgtagagccggggcctgggtggcgggtgggggccgggtgggaggtggcagtagtcttagcctgtgcactctcttccttgggtgtttggtgctggctcctggggactacaaatcccagagtgcggtgtgcccggcctcatttctgatagatcccgcttgggggaggtggtgtatggttacggagctgtgcatcttgggacatgtagtagcccaggtcttgtcactcgctgtgagatggggagattttgtcttttgatttatccctgtagggctggcagggttgtagatgaagggggaatgatctgagccttggttcccctgacacgtcttgctagccccagggttagagtgggcagggcagagccgcgcagcacctgggagcggtacctttcccttgggcagcctggggtcccaggaacaagccagggcgagtggcatgtctgcctgagcagggtgtggccccagaaagctgaggagtgtgggctggcagagagcttcgagggcaaggccacccgcgggggcgtgtgtgtggtggggcttggcatgtgatggcagctccagctccaggcatgccgctgcttgtatggctttctttggcctctgaccctgctgcccattctttccaacatcacagatgaactgcctctcctcctccctgcctggggagcccagtggccagggagggagtggtggagccagtcgctgtaacactgagcctcagagacgaaccaaaaccagctgggctgagctcagatccagggggaagaaatgctggaagtcaataaaactgagtttgagaaaaaaaaaaaaaaaa

SEQ ID NO: 51 - DNA, 2400 bp, Homo sapiens
atcctgcatggcgccgtgcggttcagcaacaaccctgccctgtgcaacgtggagagcatccagtggcgggacatagtcagcagtgactttctcagcaacatgtcgatggacttccagaaccacctgggcagctgccaaaagtgtgatccaagctgtcccaatgggagctgctggggtgcaggagaggagaactgccagaaactgaccaaaatcatctgtgcccagcagtgctccgggcgctgccgtggcaagtcccccagtgactgctgccacaaccagtgtgctgcaggctgcacaggcccccgggagagcgactgcctggtctgccgcaaattccgagacgaagccacgtgcaaggacacctgccccccactcatgctctacaaccccaccacgtaccagatggatgtgaaccccgagggcaaatacagctttggtgccacctgcgtgaagaagtgtccccgtaattatgtggtgacagatcacggctcgtgcgtccgagcctgtggggccgacagctatgagatggaggaagacggcgtccgcaagtgtaagaagtgcgaagggccttgccgcaaagtgtgtaacggaataggtattggtgaatttaaagactcactctccataaatgctacgaatattaaacacttcaaaaactgcacctccatcagtggcgatctccacatcctgccggtggcatttaggggtgactccttcacacatactcctcctctggatccacaggaactggatattctgaaaaccgtaaaggaaatcacagggtttttgctgattcaggcttggcctgaaaacaggacggacctccatgcctttgagaacctagaaatcatacgcggcaggaccaagcaacatggtcagttttctcttgcagtcgtcagcctgaacataacatccttgggattacgctccctcaaggagataagtgatggagatgtgataatttcaggaaacaaaaatttgtgctatgcaaatacaataaactggaaaaaactgtttgggacctccggtcagaaaaccaaaattataagcaacagaggtgaaaacagctgcaaggccacaggccaggtctgccatgccttgtgctcccccgagggctgctggggcccggagcccagggactgcgtctcttgccggaatgtcagccgaggcagggaatgcgtggacaagtgcaaccttctggagggtgagccaagggagtttgtggagaactctgagtgcatacagtgccacccagagtgcctgcctcaggccatgaacatcacctgcacaggacggggaccagacaactgtatccagtgtgcccactacattgacggcccccactgcgtcaagacctgcccggcaggagtcatgggagaaaacaacaccctggtctggaagtacgcagacgccggccatgtgtgccacctgtgccatccaaactgcacctacggatgcactgggccaggtcttgaaggctgtccaacgaatgggcctaagatcccgtccatcgccactgggatggtgggggccctcctcttgctgctggtggtggccctggggatcggcctcttcatgcgaaggcgccacatcgttcggaagcgcacgctgcggaggctgctgcaggagagggagcttgtggagcctcttacacccagtggagaagctcccaaccaagctctcttgaggatcttgaaggaaactgaattcaaaaagatcaaagtgctgggctccggtgcgttcggcacggtgtataagggactctggatcccagaaggtgagaaagttaaaattcccgtcgctatcaaggaattaagagaagcaacatctccgaaagccaacaaggaaatcctcgatgaagcctacgtgatggccagcgtggacaacccccacgtgtgccgcctgctgggcatctgcctcacctccaccgtgcaactcatcacgcagctcatgcccttcggctgcctcctggactatgtccgggaacacaaagacaatattggctcccagtacctgctcaactggtgtgtgcagatcgcaaagggcatgaactacttggaggaccgtcgcttggtgcaccgcgacctggcagccaggaacgtactggtgaaaacaccgcagcatgtcaagatcacagattttgggctggccaaactgctgggtgcggaagagaaagaataccatgcagaaggaggcaaagtgcctatcaagtggatggcattggaatcaattttacacagaatctatacccaccagagtgatgtctggagctacggggtgaccgtttgggagttgatgacctttggatccaagccatatgacggaatccctgccagcgagatctcctccatcctggagaaaggagaacgcctccctcagccacccatatgtaccatcgat

SEQ ID NO: 52 - DNA, 1984 bp, Homo sapiens
cccgagagcgcccattcacccccctcacccacctccccgcgttcccacttccccgcactctgacccggccggacgcccctcccctatcttgccgcccgccccctccagggggctctgctcccaccccagggagcccatccgacctctgcttgacttcccgccgcttccttcaggggcctcggctcatcgggtgcccctccccaaacttccaacccgtttgctccaggagttcctgccccatccccgagggcgcccaaatagccacactgtgtcctcctgtagtcgccgccccctgacctagcgcgacccagcgcccccgcccatgtccccccactcacctcccccggggggcgtggtgagtcgcggtctgttctcacggacggtccccgtccagcctgcgcttcgccggggccctcatctgctttcccgccaccctatcactcccttgccgtccaccctcggtcctcatggtcccagagccgggcccaaccgccaatagcaccccggcctggggggcagggccgccgtcggccccggggggcagcggctgggtggcggccgcgctgtgcgtggtcatcgcgctgacggcggcggccaactcgctgctgatcgcgctcatctgcactcagcccgcgctgcgcaacacgtccaacttcttcctggtgtcgctcttcacgtctgacctgatggtggggctggtggtgatgccgccggccatgctgaacgcgctgtacgggcgctgggtgctggcgcgcggcctctgcctgctctggaccgccttcgacgtgatgtgctgcagcgcctccatcctcaacctctgcctcatcagcctggaccgctacctgctcatcctctcgccgctgcgctacaagctgcgcatgacgcccctgcgtgccctggccctagtcctgggcgcctggagcctcgccgctctcgcctccttcctgcccctgctgctgggctggcacgagctgggccacgcacggccacccgtccctggccagtgccgcctgctggccagcctgccttttgtccttgtggcgtcgggcctcaccttcttcctgccctcgggtgccatatgcttcacctactgcaggatcctgctagctgcccgcaagcaggccgtgcaggtggcctccctcaccaccggcatggccagtcaggcctcggagacgctgcaggtgcccaggaccccacgcccaggggtggagtctgctgacagcaggcgtctagccacgaagcacagcaggaaggccctgaaggccagcctgacgctgggcatcctgctgggcatgttctttgtgacctggttgcccttctttgtggccaacatagtccaggccgtgtgcgactgcatctccccaggcctcttcgatgtcctcacatggctgggttactgtaacagcaccatgaaccccatcatctacccactcttcatgcgggacttcaagcgggcgctgggcaggttcctgccatgtccacgctgtccccgggagcgccaggccagcctggcctcgccatcactgcgcacctctcacagcggcccccggcccggccttagcctacagcaggtgctgccgctgcccctgccgccggactcagattcggactcagacgcaggctcaggcggctcctcgggcctgcggctcacggcccagctgctgcttcctggcgaggccacccaggaccccccgctgcccaccagggccgctgccgccgtcaatttcttcaacatcgaccccgcggagcccgagctgcggccgcatccacttggcatccccacgaactgacccgggcttggggctggccaatggggagctggattgagcagaacccagaccctgagtccttgggccagctcttggctaagaccaggaggctgcaagtctcctagaagccctctgagctccagaggggtgcgcagagctgaccccctgctgccatctccaggccccttacctgcagggatcatagctgactcaga

SEQ ID NO: 53 - DNA, 990 bp, Homo sapiens
cagtgtgctggcggcccggcgcgagccggcccggccccggtcgggcctccgaaaccatgaactttctgctgtcttgggtgcattggagcctcgccttgctgctctacctccaccatgccaagtggtcccaggctgcacccatggcagaaggaggagggcagaatcatcacgaagtggtgaagttcatggatgtctatcagcgcagctactgccatccaatcgagaccctggtggacatcttccaggagtaccctgatgagatcgagtacatcttcaagccatcctgtgtgcccctgatgcgatgcgggggctgctgcaatgacgagggcctggagtgtgtgcccactgaggagtccaacatcaccatgcagattatgcggatcaaacctcaccaaggccagcacataggagagatgagcttcctacagcacaacaaatgtgaatgcagaccaaagaaagatagagcaagacaagaaaatccctgtgggccttgctcagagcggagaaagcatttgtttgtacaagatccgcagacgtgtaaatgttcctgcaaaaacacagactcgcgttgcaaggcgaggcagcttgagttaaacgaacgtacttgcagatgtgacaagccgaggcggtgagccgggcaggaggaaggagcctccctcagggtttcgggaaccagatctctcaccaggaaagactgatacagaacgatcgatacagaaaccacgctgccgccaccacaccatcaccatcgacagaacagtccttaatccagaaacctgaaatgaaggaagaggagactctgcgcagagcactttgggtccggagggcgagactccggcggaagcattcccgggcgggtgacccagcacggtccctcttggaattggattcgccattttatttttcttgctgctaaatcaccgagcccggaagattagagagttttatttctgggattcctgtagacacaccgcggccgccagcacactg

SEQ ID NO: 54 - DNA, 254 bp, Homo sapiens
gctcaacccctctgggcaccaaccctgcattgcaggttggcaccttacttccctgggatccccagagttggtccaaggagggagagtgggttctcaatacggtaccaaagatataatcacctaggtttacaaatatttttaggactcacgttaactcacatttatacagcagaaatgctattttgtatgctgttaagtttttctatctgtgtacttttttttaagggaaagattttaatattaaacctggtgct

SEQ ID NO: 55 - DNA, 231 bp, Homo sapiens
cgcaggtggacgtctgatttatgaagctccccatccacctatctgagtacctgacttctcaggactgacacctacagcatcaggtacacagcttctcctagcatgacttcgatctgatcagcaaacaagaaaatttgtctcccgtagttctggggcgtgttcaccacctacaaccacagagctgtcatggctgccatctctacttccatccctgtaatttcacagccccag

SEQ ID NO: 56 - DNA, 2052 bp, Homo sapiens
gactaatcatgtacctacaagcactctagtccaaaactcatgctgctcgtatgtagttaatggagacaacacaccttcatctccgtctcaggttgctgccagacccaaaaatacaccagctccaaaaccactcgcatctgagcctgccgatgacactgttaatggagaatcatcctcatttgcaccaactgataatgcgtctgtcacgggtactccagtagtgtctgaagaaaatgccttgtctccaaattgcactagtactactgttgaagatcctccagttcaagaaatactgacttcctcagaaaacaatgaatgtattccttctaccagtgcagaattggaatctgaagctagaagtatattagagcctgacacctctaattctagaagtagttctgcttttgaagcagccaaatcaagacagccagatgggtgtatggatcctgtacggcagcagtctgggaatgccaacacagaaaccttgccatcagggtgggaacaaagaaaagatcctcatggtagaacctattatgtggatcataatactcgaactaccacatgggagagaccacaacctttacctccaggttgggaaagaagagttgatgatcgtagaagagtttattatgtggatcataacaccagaacaacaacgtggcagcggcctaccatggaatctgtccgaaattttgaacagtggcaatctcagcggaaccaattgcagggagctatgcaacagtttaaccaacgatacctctattcggcttcaatgttagctgcagaaaatgacccttatggacctttgccaccaggctgggaaaaaagagtggattcaacagacagggtttactttgtgaatcataacacaaaaacaacccagtgggaagatccaagaactcaaggcttacagaatgaagaacccctgccagaaggctgggaaattagatatactcgtgaaggtgtaaggtactttgttgatcataacacaagaacaacaacattcaaagatcctcgcaatgggaagtcatctgtaactaaaggtggtccacaaattgcttatgaacgcggctttaggtggaagcttgctcacttccgttatttgtgccagtctaatgcactacctagtcatgtaaagatcaatgtgtcccggcagacattgtttgaagattccttccaacagattatggcattaaaaccctatgacttgaggaggcgcttatatgtaatatttagaggagaagaaggacttgattatggtggcctagcgagagaatggtttttcttgctttcacatgaagttttgaacccaatgtattgcttatttgagtatgcgggcaagaacaactattgtctgcagataaatccagcatcaaccattaatccagaccatctttcatacttctgtttcattggtcgttttattgccatggcactatttcatggaaagtttatcgatactggtttctctttaccattctacaagcgtatgttaagtaaaaaacttactattaaggatttggaatctattgatactgaattttataactcccttatctggataagagataacaacattgaagaatgtggcttagaaatgtacttttctgttgacatggagattttgggaaaagttacttcacatgacctgaagttgggaggttccaatattctggtgactgaggagaacaaagatgaatatattggtttaatgacagaatggcgtttttctcgaggagtacaagaacagaccaaagctttccttgatggttttaatgaagttgttcctcttcagtggctacagtacttcgatgaaaaagaattagaggttatgttgtgtggcatgcaggaggttgacttggcagattggcagagaaatactgtttatcgacattatacaagaaacagcaagcaaatcatttggttttggcagtttgtgaaagagacagacaatgaagtaagaatgcgactattgcagttcgtcactggaacctgccgtttacctctaggaggatttgctgagctcatgggaagtaatgggccccggaattc

SEQ ID NO: 57 - DNA, 238 bp, Homo sapiens
tttttttaacgctcccaagatgtcacgtttattgcaactgagcagagacaggctgtgcggaccttcctcaatcccgtccaacccccagcccctccccaagcccccgctgcaactacgccggcaggtccgcagagtgttgcttgacagcgcgtggcggtgcccgtgagtcttaagacacctgccaagtctctggcgccgttcagtcataggtagagggactccatgagggcactgcccg

SEQ ID NO: 58 - DNA, 5062 bp, Homo sapiens
cactaacgctcttcctagtccccgggccaactcggacagtttgctcatttattgcaacggtcaaggctggcttgtgccagaacggcgcgcgcgcgacgcacgcacacacacggggggaaacttttttaaaaatgaaaggctagaagagctcagcggcggcgcgggccgtgcgcgagggctccggagctgactcgccgaggcaggaaatccctccggtcgcgacgcccggccccgctcggcgcccgcgtgggatggtgcagcgctcgccgccgggcccgagagctgctgcactgaaggccggcgacgatggcagcgcgcccgctgcccgtgtcccccgcccgcgccctcctgctcgccctggccggtgctctgctcgcgccctgcgaggcccgaggggtgagcttatggaaccaaggaagagctgatgaagttgtcagtgcctctgttcggagtggggacctctggatcccagtgaagagcttcgactccaagaatcatccagaagtgctgaatattcgactacaacgggaaagcaaagaactgatcataaatctggaaagaaatgaaggtctcattgccagcagtttcacggaaacccactatctgcaagacggtactgatgtctccctcgctcgaaattacacggtaattctgggtcactgttactaccatggacatgtacggggatattctgattcagcagtcagtctcagcacgtgttctggtctcaggggacttattgtgtttgaaaatgaaagctatgtcttagaaccaatgaaaagtgcaaccaacagatacaaactcttcccagcgaagaagctgaaaagcgtccggggatcatgtggatcacatcacaacacaccaaacctcgctgcaaagaatgtgtttccaccaccctctcagacatgggcaagaaggcataaaagagagaccctcaaggcaactaagtatgtggagctggtgatcgtggcagacaaccgagagtttcagaggcaaggaaaagatctggaaaaagttaagcagcgattaatagagattgctaatcacgttgacaagttttacagaccactgaacattcggatcgtgttggtaggcgtggaagtgtggaatgacatggacaaatgctctgtaagtcaggacccattcaccagcctccatgaatttctggactggaggaagatgaagcttctacctcgcaaatcccatgacaatgcgcagcttgtcagtggggtttatttccaagggaccaccatcggcatggccccaatcatgagcatgtgcacggcagaccagtctgggggaattgtcatggaccattcagacaatccccttggtgcagccgtgaccctggcacatgagctgggccacaatttcgggatgaatcatgacacactggacaggggctgtagctgtcaaatggcggttgagaaaggaggctgcatcatgaacgcttccaccgggtacccatttcccatggtgttcagcagttgcagcaggaaggacttggagaccagcctggagaaaggaatgggggtgtgcctgtttaacctgccggaagtcagggagtctttcgggggccagaagtgtgggaacagatttgtggaagaaggagaggagtgtgactgtggggagccagaggaatgtatgaatcgctgctgcaatgccaccacctgtaccctgaagccggacgctgtgtgcgcacatgggctgtgctgtgaagactgccagctgaagcctgcaggaacagcgtgcagggactccagcaactcctgtgacctcccagagttctgcacaggggccagccctcactgcccagccaacgtgtacctgcacgatgggcactcatgtcaggatgtggacggctactgctacaatggcatctgccagactcacgagcagcagtgtgtcacactctggggaccaggtgctaaacctgcccctgggatctgctttgagagagtcaattctgcaggtgatccttatggcaactgtggcaaagtctcgaagagttcctttgccaaatgcgagatgagagatgctaaatgtggaaaaatccagtgtcaaggaggtgccagccggccagtcattggtaccaatgccgtttccatagaaacaaacatccccctgcagcaaggaggccggattctgtgccgggggacccacgtgtacttgggcgatgacatgccggacccagggcttgtgcttgcaggcacaaagtgtgcagatggaaaaatctgcctgaatcgtcaatgtcaaaatattagtgtctttggggttcacgagtgtgcaatgcagtgccacggcagaggggtgtgcaacaacaggaagaactgccactgcgaggcccactgggcacctcccttctgtgacaagtttggctttggaggaagcacagacagcggccccatccggcaagcagataaccaaggtttaaccataggaattctggtgaccatcctgtgtcttcttgctgccggatttgtggtttatctcaaaaggaagaccttgatacgactgctgtttacaaataagaagaccaccattgaaaaactaaggtgtgtgcgcccttcccggccaccccgtggcttccaaccctgtcaggctcacctcggccaccttggaaaaggcctgatgaggaagccgccagattcctacccaccgaaggacaatcccaggagattgctgcagtgtcagaatgttgacatcagcagacccctcaacggcctgaatgtccctcagccccagtcaactcagcgagtgcttcctcccctccaccgggccccacgtgcacctagcgtccctgccagacccctgccagccaagcctgcacttaggcaggcccaggggacctgtaagccaaacccccctcagaagcctctgcctgcagatcctctggccagaacaactcggctcactcatgccttggccaggaccccaggacaatgggagactgggctccgcctggcacccctcagacctgctccacaatatccacaccaagtgcccagatccacccacaccgcctatattaagtgagaagccgacaccttttttcaacagtgaagacagaagtttgcactatctttcagctccagttggagttttttgtaccaacttttaggattttttttaatgtttaaaacatcattactataagaactttgagctactgccgtcagtgctgtgctgtgctatggtgctctgtctacttgcacaggtacttgtaaattattaatttatgcagaatgttgattacagtgcagtgcgctgtagtaggcatttttaccatcactgagttttccatggcaggaaggcttgttgtgcttttagtattttagtgaacttgaaatatcctgcttgatgggattctggacaggatgtgtttgctttctgatcaaggccttattggaaagcagtcccccaactacccccagctgtgcttatggtaccagatgcagctcaagagatcccaagtagaatctcagttgattttctggattccccatctcaggccagagccaaggggcttcaggtccaggctgtgtttggctttcagggaggccctgtgccccttgacaactggcaggcaggctcccagggacacctgggagaaatctggcttctggccaggaagctttggtgagaacctgggttgcagacaggaatcttaaggtgtagccacaccaggatagagactggaacactagacaagccagaacttgaccctgagctgaccagccgtgagcatgtttggaaggggtctgtagtgtcactcaaggcggtgcttgatagaaatgccaagcacttctttttctcgctgtcctttctagagcactgccaccagtaggttatttagcttgggaaaggtggtgtttctgtaagaaacctactgcccaggcactgcaaaccgccacctccctatactgcttggagctgagcaaatcaccacaaactgtaatacaatgatcctgtattcagacagatgaggactttccatgggaccacaactattttcagatgtgaaccattaaccagatctagtcaatcaagtctgtttactgcaaggttcaacttattaacaattaggcagactctttatgcttgcaaaaactacaaccaatggaatgtgatgttcatgggtatagttcatgtctgctatcattattcgtagatattggacaaagaaccttctctatggggcatcctctttttccaacttggctgcaggaatctttaaaagatgcttttaacagagtctgaacctatttcttaaacacttgcaacctacctgttgagcatcacagaatgtgataaggaaatcaacttgcttatcaacttcctaaatattatgagatgtggcttgggcagcatccccttgaactcttcactcttcaaatgcctgactagggagccatgtttcacaaggtctttaaagtgactaatggcatgagaaatacaaaaatactcagataaggtaaaatgccatgatgcctctgtcttctggactggttttcacattagaagacaattgacaacagttacataattcactctgagtgttttatgagaaagccttcttttggggtcaacagttttcctatgctttgaaacagaaaaatatgtaccaagaatcttggtttgccttccagaaaacaaaactgcatttcactttcccggtgttccccactgtatctaggcaacatagtattcatgactatggataaactaaacacgtgacacaaacacacacaaaagggaacccagctctaatacattccaactcgtatagcatgcatctgtttattctatagttattaagttctttaaaatgtaaagccatgctggaaaataatactgctgagatacatacagaattactgtaactgattacacttggtaattgtactaaagccaaacatatatatactattaaaaaggtttacagaattttatggtgcattacgtgggcattgtctttttagatgcccaaatccttagatctggcatgttagcccttcctccaattataagaggatatgaaccaaaaaaaaaaaaaaaaaaa

SEQ ID NO: 59 - DNA, 560 bp, Homo sapiens
ggcagtttaatagatgttactcaaagaattttttaagaactgtattttattttttaaatggtgttttattacaagggaccttgaacatgttttgtatgttaaattcaaaagtaatgcttcaatcagatagttctttttcacaagttcaatctgtttttcatgtaaattttgtatgaaaaatcaatgtcaagtaccaaaatgttaatgtatgtgtcatttaactctgcctgagactttcagtgcactgtatatagaagtctaaaacacacctaagagaaaaagatcgaatttttcagatgattcagaaattttcattcaggtatttgtaatagtgacatatatatgtatatacatatcacctcctattctcttaatttttcttaaaatgttaactggcagtaaagcttttttgatcattcccttttccatataggaaacataattttgaagtggccagatgagtttatcatgtcagtgaaaaattaatacccacaaatggcaccagaacttacgattcttcacttcttggggttttcagtatgaacctaactccccacccc

SEQ ID NO: 60 - DNA, 1811 bp, Homo sapiens
cggttctccaagcacccagcatcctgctagacgcgccgcgcaccgacggaggggacatgggcagagcaatggtggccaggctcgggctggggctgctgctgctggcactgctcctacccacgcagatttattccagtgaaacaacaactggaacttcaagtaactcctcccagagtacttccaactctgggttggccccaaatccaactaatgccaccaccaaggcggctggtggtgccctgcagtcaacagccagtctcttcgtggtctcactctctcttctgcatctctactcttaagagactcaggccaagaaacgtcttctaaatttccccatcttctaaacccaatccaaatggcgtctggaagtccaatgtggcaaggaaaaacaggtcttcatcgaatctactaattccacaccttttattgacacagaaaatgttgagaatcccaaatttgattgatttgaagaacatgtgagaggtttgactagatgatggatgccaatattaaatctgctggagtttcatgtacaagatgaaggagaggcaacatccaaaatagttaagacatgatttccttgaatgtggcttgagaaatatggacacttaatactaccttgaaaataagaatagaaataaaggatgggattgtggaatggagattcagttttcatttggtgcttaattctataagcgtataaacaggtaatataaaaagcttccatgattctatttatatgtacatgagaaggaacttccaggtgttactgtaattcctcaacgtattgtttcgacggcactaatttaatgccgatatactctagatgaagttttacattgttgagctattgctgttctcttgggaactgaactcactttcctcctgaggctttggatttgacattgcatttgaccttttatgtagtaattgacatgtgccagggcaatgatgaatgagaatctaccccagatccaagcatcctgagcaactcttgattatccatattgagtcaaatggtaggcatttcctatcacctgtttccattcaacaagagcactacattcatttagctaaacggattccaaagagtagaattgcattgaccacgactaatttcaaaatgctttttattattattattttttagacagtctcactttgtcgcccaggccggagtgcagtggtgcgatctcagatcagtgtaccatttgcctcccgggctcaagcgattctcctgcctcagcctcccaagtagctgggattacaggcacctgccaccatgcccggctaatttttgtaattttagtagagacagggtttcaccatgttgcccaggctggtttcgaactcctgacctcaggtgatccacccgcctcggcctcccaaagtgctgggattacaggcttgagcccccgcgcccagccatcaaaatgctttttatttctgcatatgtttgaatactttttacaatttaaaaaaatgatctgttttgaaggcaaaattgcaaatcttgaaattaagaaggcaaaatgtaaaggagtcaaactataaatcaagtatttgggaagtgaagactggaagctaatttgcataaattcacaaacttttatactctttctgtatatacattttttttctttaaaaaacaactatggatcagaatagccacatttagaacactttttgttatcagtcaatatttttagatagttagaacctggtcctaagcctaaaagtgggcttgattctgcagtaaatcttttacaactgcctcgacacacataaacctttttaaaaatagacactcc

SEQ ID NO: 61 - DNA, 335 bp, Homo sapiens
caacgagaaggtggagctgcaggagctgaatgaccgcttcgccaactacatcgacaaggtgcgcttcctggagcagcagaataagatcctgctggccgagctcgagcagctcaagggccaaggcaagtcgcgcctgggggacctctacgaggaggagatgcgggactgcgccggcagtggaccagctaaccaacgacaaagcccgcgtcgaggtggagcgcgacaacctggccgaggacatcatgcgcctccgggagaaattgcaggaggagatgcttcagagagaggaagccgaaaacaccctgcaatctttcagacaggatgttgacaatgcg

SEQ ID NO: 62 - DNA, 1152 bp, Homo sapiens
cgctcctcgggctgcccctcggttgacaatggtctccaggatggtctctaccatgctatctggcctactgttttggctggcatctggatggactccagcatttgcttacagcccccggacccctgaccgggtctcagaagcagatatccagaggctgcttcatggtgttatggagcaattgggcattgccaggccccgagtggaatatccagctcaccaggccatgaatcttgtgggcccccagagcattgaaggtggagctcatgaaggacttcagcatttgggtccttttggcaacatccccaacatcgtggcagagttgactggagacaacattcctaaggactttagtgaggatcaggggtacccagaccctccaaatccctgtcctgttggaaaaacagatgatggatgtctagaaaacacccctgacactgcagagttcagtcgagagttccagttgcaccagcatctctttgatccggaacatgactatccaggcttgggcaagtggaacaagaaactcctttacgagaagatgaagggaggagagagacgaaagcggaggagtgtcaatccatatctacaaggacagagactggataatgttgttgcaaagaagtctgtcccccatttttcagatgaggataaggatccagagtaaagagaagatgctagacgaaaacccacattacctgttaggcctcagcatggcttatgtgcacgtgtaaatggagtccctgtgaatgacagcatgtttcttacatagataattatggatacaaagcagctgtatgtagatagtgtattgtcttcacaccgatgattctgctttttgctaaattagaataagagcttttttgtttcttgggtttttaaaatgtgaatctgcaatgatcataaaaattaaaatgtgaatgtcaacaataaaaagcaagactatgaaaggctcagatttcttgcagtttaaaatggtgtctgaggttgtactattttggccaagtctgtagaaagctgtcatttgattttgattatgtagttcatccagcccttgggcattgttatacaccagtaaagaaggctgtactcaagaggaggagctgacacatttcacttggctgcgtcttaataaacatgaatgcaagcattggc

SEQ ID NO: 63 - DNA, 3018 bp, Homo sapiens
gcacgagggaacaacctctctctctscagcagagagtgtcacctcctgctttaggaccatcaagctctgctaactgaatctcatcctaattgcaggatcacattgcaaagctttcactctttcccaccttgcttgtgggtaaatctcttctgcggaatctcagaaagtaaagttccatcctgagaatatttcacaaagaatttccttaagagctggactgggtcttgacccctggaatttaagaaattcttaaagacaatgtcaaatatgatccaagagaaaatgtgatttgagtctggagacaattgtgcatatcgtctaataataaaaacccatactagcctatagaaaacaatatttgaataataaaaacccatactagcctatagaaaacaatatttgaaagattgctaccactaaaaagaaaactactacaacttgacaagactgctgcaaacttcaattggtcaccacaacttgacaaggttgctataaaacaagattgctacaacttctagtttatgttatacagcatatttcatttgggcttaatgatggagaaaaagtgtaccctgtattttctggttctcttgcctttttttatgattcttgttacagcagaattagaagagagtcctgaggactcaattcagttgggagttactagaaataaaatcatgacagctcaatatgaatgttaccaaaagattatgcaagaccccattcaacaagcagaaggcgtttactgcaacagaacctgggatggatggctctgctggaacgatgttgcagcaggaactgaatcaatgcagctctgccctgattactttcaggactttgatccatcagaaaaagttacaaagatctgtgaccaagatggaaactggtttagacatccagcaagcaacagaacatggacaaattatacccagtgtaatgttaacacccacgagaaagtgaagactgcactaaatttgttttacctgaccataattggacacggattgtctattgcatcactgcttatctcgcttggcatattcttttatttcaagagcctaagttgccaaaggattaccttacacaaaaatctgttcttctcatttgtttgtaactctgttgtaacaatcattcacctcactgcagtggccaacaaccaggccttagtagccacaaatcctgttagttgcaaagtgtcccagttcattcatctttacctgatgggctgtaattacttttggatgctctgtgaaggcatttacctacacacactcattgtggtggccgtgtttgcagagaagcaacatttaatgtggtattattttcttggctggggatttccactgattcctgcttgtatacatgccattgctagaagcttatattacaatgacaattgctggatcagttctgatacccatctcctctacattatccatggcccaatttgtgctgctttactggtgaatctttttttcttgttaaatattgtacgcgttctcatcaccaagttaaaagttacacaccaagcggaatccaatctgtacatgaaagctgtgagagctactcttatcttggtgccattgcttggcattgaatttgtgctgattccatggcgacctgaaggaaagattgcagaggaggtatatgactacatcatgcacatccttatgcacttccagggtcttttggtctctaccattttctgcttctttaatggagaggttcaagcaattctgagaagaaactggaatcaatacaaaatccaatttggaaacagcttttccaactcagaagctcttcgtagtgcgtcttacacagtgtcaacaatcagtgatggtccaggttatagtcatgactgtcctagtgaacacttaaatggaaaaagcatccatgatattgaaaatgttctcttaaaaccagaaaatttatataattgaaaatagaaggatggttgtctcactgtttggtgcttctcctaactcaaggacttggacccatgactctgtagccagaagacttcaatattaaatgactttggggaatgtcataaagaagagccttcacatgaaattagtagtgtgttgataagagtgtaacatccagctctatgtgggaaaaaagaaatcctggtttgtaatgtttgtcagtaaatactcccactatgcctgatgtgacgctactaacctgacatcaccaagtgtggaattggagaaaagcacaatcaacttttctgagctggtgtaagccagttccagcacaccattgatgaattcaaacaaatggctgtaaaactaaacatacatgttgggcatgattctacccttattcsccccaagagacctagctaaggtctataaacatgaagggaaaattagcttttagttttaaaactctttatcccatcttgattggggcagttgactttttttttttcccagagtgccgtagtcctttttgtaactaccctctcaaatggacaataccagaagtgaattatccctgctggctttcttttctctatgaaaagcaactgagtacaattgttatgatctactcatttgctgacacatcagttatatcttgtggcatatccattgtggaaactggatgaacaggatgtataatatgcaatcttacttctatatcattaggaaaacatcttagttgatgctacaaaacaccttgtcaacctcttcctgtcttaccaaacagtgggagggaattcctagctgtaaatataaattttgcccttccatttctactgtataaacaaattagcaatcattttatataaagaaaatcaatgaaggatttcttattttcttggaattttgtaaaaagaaattgtgaaaaatgagcttgtaaatactccattattttattttatagtctcaaatcaaatacatacaacctatgtaatttttaaagcaaatatataatgcaacaatgtgtgtatgttaatatctgatactgtatctgggctgattttttaaataaaatagagtctggaatgct

SEQ ID NO: 64 - DNA, 255 bp, Homo sapiens
  modified_base (3): a, t, c, g, other or unknown
  modified_base (45): a, t, c, g, other or unknown
  modified_base (63): a, t, c, g, other or unknown
  modified_base (84): a, t, c, g, other or unknown
  modified_base (104): a, t, c, g, other or unknown
  modified_base (137)..(138): a, t, c, g, other or unknown
  modified_base (141): a, t, c, g, other or unknown
  modified_base (153)..(154): a, t, c, g, other or unknown
  modified_base (170): a, t, c, g, other or unknown
  modified_base (177): a, t, c, g, other or unknown
  modified_base (198): a, t, c, g, other or unknown
  modified_base (204): a, t, c, g, other or unknown
  modified_base (230): a, t, c, g, other or unknown
  modified_base (250): a, t, c, g, other or unknown
ggnccaccaagaaccagccgcgtctacggcttcatcggcctctgnctggctgctgggccgcgnctgctggggatgctgcctttnctgggctggaactgcctgtncgcctttaaccgctgctccagccttctgggggnntantccattttttannttctcttctgcctggngatcttngccggcgtcctggccaccatnatgggnctctatggggccatcttccgcctggngcaggccagcgggcagaagncccca

SEQ ID NO: 65 - DNA, 1035 bp, Homo sapiens
gaattccggcccgccgtcccccaccccgccgccccgcccggcgaattgcgccccgcgcccctcccctcgcgcccccgagacaaagaggagagaaagtttgcgcggccgagcggggcaggtgaggagggtgagccgcgcgggaggggcccgcctcggccccggctcagcccccgcccgcgcccccagcccgccgccgcgagcagcgcccggaccccccagcggcggcccccgcccgcccagccccccggcccgccatgggcgccgcggcccgcaccctgcggctggcgctcggcctcctgctgctggcgacgctgcttcgcccggccgacgcctgcagctgctccccggtgcacccgcaacaggcgttttgcaatgcagatgtagtgatcagggccaaagcggtcagtgagaaggaagtggactctggaaacgacatttatggcaaccctatcaagaggatccagtatgagatcaagcagataaagatgttcaaagggcctgagaaggatatagagtttatctacacggccccctcctcggcagtgtgtggggtctcgctggacgttggaggaaagaaggaatatctcattgcaggaaaggccgagggggacggcaagatgcacatcaccctctgtgacttcatcgtgccctgggacaccctgagcaccacccagaagaagagcctgaaccacaggtaccagatgggctgcgagtgcaagatcacgcgctgccccatgatcccgtgctacatctcctccccggacgagtgcctctggatggactgggtcacagagaagaacatcaacgggcaccaggccaagttcttcgcctgcatcaagagaagtgacggctcctgtgcgtggtaccgcggcgcggcgccccccaagcaggagtttctcgacatcgaggacccataagcaggcctccaacgcccctgtggccaactgcaaaaaaagcctccaagggtttcgactggtccagctctgacatcccttcctggaaacagcatgaataaaacactcatccccggaattc

SEQ ID NO: 66 - DNA, 2402 bp, Homo sapiens
agctcacagcaagtccaggctagaggtagaaacgtgagagccccacggctggggaagattgccatgggattggagatgagctccaaggacagccctggcagtctggatggaagagcttgggaagatgctcagaaaccacaaagtgcctggtgcggtgggaggaaaaccagagtgtatgctacaagcagccggcgggcgccgccgagtgaggggacgcggcgcggtggggcggcgcggcccgaggaggcggcggaggaggggccgcccgcggcccccggctcactccggcactccgggccgctcggcccccatgcctgcccgaccgcgctgccggagccccaggtgaccagcgccatgtccagccaggtggtgggcattgagcctctctacatcaaggcagagccggccagccctgacagtccaaagggttcctcggagacagagaccgagcctcctgtggccctggcccctggtccagctcccactcgctgcctcccaggccacaaggaagaggaggatggggagggggctgggcctggcgagcagggcggtgggaagctggtgctcagctccctgcccaagcgcctctgcctggtctgtggggacgtggcctccggctaccactatggtgtggcatcctgtgaggcctgcaaagccttcttcaagaggaccatccaggggagcatcgagtacagctgtccggcctccaacgagtgtgagatcaccaagcggagacgcaaggcctgccaggcctgccgcttcaccaagtgcctgcgggtgggcatgctcaaggagggagtgcgcctggaccgcgtccggggtgggcggcagaagtacaagcggcggccggaggtggacccactgcccttcccgggccccttccctgctgggcccctggcagtcgctggaggcccccggaagacagcagccccagtgaatgcactggtgtctcatctgctggtggttgagcctgagaagctctatgccatgcctgaccccgcaggccctgatgggcacctcccagccgtggctaccctctgtgacctctttgaccgagagattgtggtcaccatcagctgggccaagagcatcccaggcttctcatcgctgtcgctgtctgaccagatgtcagtactgcagagcgtgtggatggaggtgctggtgctgggtgtggcccagcgctcactgccactgcaggatgagctggccttcgctgaggacttagtcctggatgaagagggggcacgggcagctggcctgggggaactgggggctgccctgctgcaactagtgcggcggctgcaggccctgcggctggagcgagaggagtatgttctactaaaggccttggcccttgccaattcagactctgtgcacatcgaagatgagccgaggctgtggagcagctgcgagaagctcctgcacgaggccctgctggagtatgaagccggccgggctggccccggagggggtgctgagcggcggcgggcgggcaggctgctgctcacgctaccgctcctccgccagacagcgggcaaagtgctggcccatttctatggggtgaagctggagggcaaggtgcccatgcacaagctgttcttggagatgctcgaggccatgatggactgaggcaaggggtgggactggtgggggttctggcaggacctgcctagcatggggtcagccccaagggctggggcggagctggggtctgggcagtgcacagcctgctggcagggccagggctaatgccatcagcccctgggaacaggccccacgccctctcctccccctcctagggggtgtcagaagctgggaacgtgtgtccaggctctgggcacagtgctgccccttgcaagccataacggtgcccccagagtgtagggggccttgcggaagccatagggggctgcacgggatgcgtgggaggcagaaacctatctcagggagggaaggggatggaggccagagtctcccagtgggtgatgcttttgctgctgcttaatcctaccccctcttcaaagcagagtgggacttggagagcaaaggcccatgcccccttcgctcctcctctcatcatttgcattgggcattagtgtccccccttgaagcaataactccaagcagactccagcccctggacccctggggtggccagggcttccccatcagctcccaacgagcctcctcagggggtaggagagcactgcctctatgccctgcagagcaataacactatatttatttttgggtttggccagggaggcgcagggacatggggcaagccagggcccagagcccttggctgtacagagactctattttaatgtatatttgctgcaaagagaaaccgcttttggttttaaacctttaatgagaaaaaaatatataataccgagctc

SEQ ID NO: 67 - DNA, 4119 bp, Homo sapiens
ctggagagcctgctgcccgcccgcccgtaaaatggtcccctcggctggacagctcgccctgttcgctctgggtattgtgttggctgcgtgccaggccttggagaacagcacgtccccgctgagtgcagacccgcccgtggctgcagcagtggtgtcccattttaatgactgcccagattcccacactcagttctgcttccatggaacctgcaggtttttggtgcaggaggacaagccagcatgtgtctgccattctgggtacgttggtgcacgctgtgagcatgcggacctcctggccgtggtggctgccagccagaagaagcaggccatcaccgccttggtggtggtctccatcgtggccctggctgtccttatcatcacatgtgtgctgatacactgctgccaggtccgaaaacactgtgagtggtgccgggccctcatctgccggcacgagaagcccagcgccctcctgaagggaagaaccgcttgctgccactcagaaacagtggtctgaagagcccagaggaggagtttggccaggtggactgtggcagatcaataaagaaaggcttcttcaggacagcactgccagagatgcctgggtgtgccacagaccttcctacttggcctgtaatcacctgtgcagccttttgtgggccttcaaaactctgtcaagaactccgtctgcttggggttattcagtgtgacctagagaagaaatcagcggaccacgatttcaagacttgttaaaaaagaactgcaaagagacggactcctgttcacctaggtgaggtgtgtgcagcagttggtgtctgagtccacatgtgtgcagttgtcttctgccagccatggattccaggctatatatttctttttaatgggccacctccccacaacagaattctgcccaacacaggagatttctatagttattgttttctgtcatttgcctactggggaagaaagtgaaggaggggaaactgtttaatatcacatgaagaccctagctttaagagaagctgtatcctctaaccacgagactctcaaccagcccaacatcttccatggacacatgacattgaagaccatcccaagctatcgccacccttggagatgatgtcttatttattagatggataatggttttatttttaatctcttaagtcaatgtaaaaagtataaaaccccttcagacttctacattaatgatgtatgtgttgctgactgaaaagctatactgattagaaatgtctggcctcttcaagacagctaaggcttgggaaaagtcttccagggtgcggagatggaaccagaggctgggttactggtaggaataaaggtaggggttcagaaatggtgccattgaagccacaaagccggtaaatgcctcaatacgttctgggagaaaacttagcaaatccatcagcagggatctgtcccctctgttggggagagaggaagagtgtgtgtgtctacacaggataaacccaatacatattgtactgctcagtgattaaatgggttcacttcctcgtgagccctcggtaagtatgtttagaaatagaacattagccacgagccataggcatttcaggccaaatccatgaaagggggaccagtcatttattttccattttgttgcttggttggtttgttgctttatttttaaaaggagaagtttaactttgctatttattttcgagcactaggaaaactattccagtaatttttttttcctcatttccattcaggatgccggctttattaacaaaaactctaacaagtcacctccactatgtgggtcttcctttcccctcaagagaaggagcaattgttcccctgacatctgggtccatctgacccatggggcctgcctgtgagaaacagtgggtcccttcaaatacatagtggatagctcatccctaggaattttcattaaaatttggaaacagagtaatgaagaaataatatataaactccttatgtgaggaaatgctactaatatctgaaaagtgaaagatttctatgtattaactcttaagtgcacctagcttattacatcgtgaaaggtacatttaaaatatgttaaattggcttgaaattttcagagaattttgtcttcccctaattcttcttccttggtctggaagaacaatttctatgaattttctctttattttttttttataattcagacaattctatgacccgtgtcttcatttttggcactcttatttaacaatgccacacctgaagcacttggatctgttcagagctgaccccctagcaacgtagttgacacagctccaggtttttaaattactaaaataagttcaagtttacatcccttgggccagatatgtgggttgaggcttgactgtagcatcctgcttagagaccaatcaatggacactggtttttagacctctatcaatcagtagttagcatccaagagactttgcagaggcgtaggaatgaggctggacagatggcggaacgagaggttccctgcgaagacttgagatttagtgtctgtgaatgttctagttcctaggtccagcaagtcacacctgccagtgccctcatccttatgcctgtaacacacatgcagtgagaggcctcacatatacgcctccctagaagtgccttccaagtcagtcctttggaaaccagcaggtctgaaaaagaggctgcatcaatgcaagcctggttggaccattgtccatgcctcaggatagaacagcctggcttatttggggatttttcttctagaaatcaaatgactgataagcattggctccctctgccatttaatggcaatggtagtctttggttagctgcaaaaatactccatttcaagttaaaaatgcatcttctaatccatctctgcaagctccctgtgtttccttgccctttagaaaatgaattgttcactacaattagagaatcatttaacatcctgacctggtaagctgccacacacctggcagtggggagcatcgctgtttccaatggctcaggagacaatgaaaagcccccatttaaaaaaataacaaacattttttaaaaggcctccaatactcttatggagcctggatttttcccactgctctacaggctgtgactttttttaagcatcctgacaggaaatgttttcttctacatggaaagatagacagcagccaaccctgatctggaagacagggccccggctggacacacgtggaaccaagccagggatgggctggccattgtgtccccgcaggagagatgggcagaatggccctagagttcttttccctgagaaaggagaaaaagatgggattgccactcacccacccacactggtaagggaggagaatttgtgcttctggagcttctcaagggattgtgttttgcaggtacagaaaactgcctgttatcttcaagccaggttttcgagggcacatgggtcaccagttgctttttcagtcaatttggccgggatggactaatgaggctctaacactgctcaggagacccctgccctctagttggttctgggctttgatctcttccaacctgcccagtcacagaaggaggaatgactcaaatgcccaaaaccaagaacacattgcagaagtaagacaaacatgtatatttttaaatgttctaacataagacctgttctctctagccattgatttaccaggctttctgaaagatctagtggttcacacagagagagagagagtactgaaaaagcaactcctcttcttagtcttaataatttactaaaatggtcaacttttcattatctttattataataaacctgatgcttttttttagaactccttactctgatgtctgtatatgttgcactgaaaaggttaatatttaatgttttaatttattttgtgtggtaagttaattttgatttctgtaatgtgttaatgtgattagcagttattttccttaatatctgaattatacttaaagagtagtgagcaatataagacgcaattgtgtttttcagtaatgtgcattgttattgagttgtactgtaccttatttggaaggatgaaggaatgaacctttttttcctaaaaaaaaaaaaaaaaaaaaaaaaaaaaaaaaa

SEQ ID NO: 68 - DNA, 447 bp, Homo sapiens
gcacttcacatacagtatttcatttagtgcaacaatcctgcagtactggtcttaacctaatgttgcaaatggggaatctgagattcaacaaggttaattagcttgcccgtaatcataagcacataaatgtgattctcaaggattccaaggcccttgctcagtttactggccatgctgttttcttgcattttatgtaggaagaacaggacccaggcatctccctccaccattgacctccagagaagagatgacacagttggaagggctgtctaagacagacaggaaatggagttgggggccaaatctaagttaggggatctgagttaggggagcacttctcaggagtgaaaatgcacaggaaagtggtggctggagttggaagtgttagaggcctgagatctacggtcttgcgctgctacagcacctgcaagttctactgagcagaca

SEQ ID NO: 69 - DNA, 569 bp, Homo sapiens
cagatgtgggattactagctgtaattgcaaataacatcattaccattaacaaggaccaaaatgtctttgactccaagaagaaagtgaaattaaccaatgcggaaggagtagagtttaagctttccaagaaacaactacaagctatagaatttaacaaagctttacttgctatgtacacaaaccaggctgaacaatgccgcaaaatatctgccagtttacagtcccaaagtcccgagcatctcttacctgtgttaatccaagctgcccagctctgccgtgaaaagcagcacacaaaagcaatagagctgcttcaggaattttcagatcagcatccagaaaatgcagctgaaattaagctgaccatggcacagttgaaaatttctcaaggtaatatttctaaagcatgtctaatattgagaagcatagaggagttaaagcataaaccaggcatggtatctgcattagttaccatgtatagccatgaagaagatattgatagtgccattgaggtcttcacacaagctatccagtggtatcaaaaccatcagccaaaatctcctgctcatttg

SEQ ID NO: 70 - DNA, 1357 bp, Homo sapiens
atctcaacaacgagttaccaatacttgctcttgattgataaacagaatggggttttggatcttagcaattctcacaattctcatgtattccacagcagcaaagtttagtaaacaatcatggggcctggaaaatgaggctttaattgtaagatgtcctagacaaggaaaacctagttacaccgtggattggtattactcacaaacaaacaaaagtattcccactcaggaaagaaatcgtgtgtttgcctcaggccaacttctgaagtttctaccagctgaagttgctgattctggtatttatacctgtattgtcagaagtcccacattcaataggactggatatgcgaatgtcaccatatataaaaaacaatcagattgcaatgttccagattatttgatgtattcaacagtatctggatcagaaaaaaattccaaaatttattgtcctaccattgacctctacaactggacagcacctcttgagtggtttaagaattgtcaggctcttcaaggatcaaggtacagggcgcacaagtcatttttggtcattgataatgtgatgactgaggacgcaggtgattacacctgtaaatttatacacaatgaaaatggagccaattatagtgtgacggcgaccaggtccttcacggtcaaggatgagcaaggcttttctctgtttccagtaatcggagcccctgcacaaaatgaaataaaggaagtggaaattggaaaaaacgcaaacctaacttgctctgcttgttttggaaaaggcactcagttcttggctgccgtcctgtggcagcttaatggaacaaaaattacagactttggtgaaccaagaattcaacaagaggaagggcaaaatcaaagtttcagcaatgggctggcttgtctagacatggttttaagaatagctgacgtgaaggaagaggatttattgctgcagtacgactgtctggccctgaatttgcatggcttgagaaggcacaccgtaagactaagtaggaaaaatccaagtaaggagtgtttctgagactttgatcacctgaactttctctagcaagtgtaagcagaatggagtgtggttccaagagatccatcaagacaatgggaatggcctgtgccataaaatgtgcttctcttcttcgggatgttgtttgctgtctgatctttgtagactgttcctgtttgctgggagcttctctgctgcttaaattgttcgtcctcccccactccctcctatcgttggtttgtctagaacactcagctgcttctttggtcatccttgttttctaactttatgaactccctctgtgtcactgtatgtgaaaggaaatgcaccaacaaccgaaaactg

SEQ ID NO: 71 - DNA, 2733 bp, Homo sapiens
cctctgtctcctgggctgcctgctgagccacgccgccgccgcgccgtcgcccatcatcaagttccccggcgatgtcgcccccaaaacggacaaagagttggcagtgcaatacctgaacaccttctatggctgccccaaggagagctgcaacctgtttgtgctgaaggacacactaaagaagatgcagaagttctttggactgccccagacaggtgatcttgaccagaataccatcgagaccatgcggaagccacgctgcggcaacccagatgtggccaactacaacttcttccctcgcaagcccaagtgggacaagaaccagatcacatacaggatcatcggctacacacctgatctggacccagagacagtggatgatgcctttgctcgtgccttccaagtctggagcgatgtgaccccactgcggttttctcgaatccatgatggagaggcagacatcatgatcaactttggccgctgggagcatggcgatggatacccctttgacggtaaggacggactcctggctcatgccttcgccccaggcactggtgttgggggagactcccattttgatgacgatgagctatggaccttgggagaaggccaagtggtccgtgtgaagtatgggaacgccgatggggagtactgcaagttccccttcttgttcaatggcaaggagtacaacagctgcactgatactggccgcagcgatggcttcctctggtgctccaccacctacaactttgagaaggatggcaagtacggcttctgtccccatgaagccctgttcaccatgggcggcaacgctgaaggacagccctgcaagtttccattccgcttccagggcacatcctatgacagctgcaccactgagggccgcacggatggctaccgctggtgcggcaccactgaggactacgaccgcgacaagaagtatggcttctgccctgagaccgccatgtccactgttggtgggaactcagaaggtgccccctgtgtcttccccttcactttcctgggcaacaaatatgagagctgcaccagcgccggccgcagtgacggaaagatgtggtgtgcgaccacagccaactacgatgacgaccgcaagtggggcttctgccctgaccaagggtacagcctgttcctcgtggcagcccacgagtttggccacgccatggggctggagcactcccaagaccctggggccctgatggcacccatttacacctacaccaagaacttccgtctgtcccaggatgacatcaagggcattcaggagctctatggggcctctcctgacattgaccttggcaccggccccacccccacactgggccctgtcactcctgagatctgcaaacaggacattgtatttgatggcatcgctcagatccgtggtgagatcttcttcttcaaggaccggttcatttggcggactgtgacgccacgtgacaagcccatggggcccctgctggtggccacattctggcctgagctcccggaaaagattgatgcggtatacgaggccccacaggaggagaaggctgtgttctttgcagggaatgaatactggatctactcagccagcaccttggagcgagggtaccccaagccactgaccagcctgggactgccccctgatgtccagcgagtggatgccgcctttaactggagcaaaaacaagaagacatacatctttgctggagacaaattctggagatacaatgaggtgaagaagaaaatggatcctggcttccccaagctcatcgcagatgcctggaatgccatccccgataacctggatgccgtcgtggacctgcagggcggcggtcacagctacttcttcaagggtgcctattacctgaagctggagaaccaaagtctgaagagcgtgaagtttggaagcatcaaatccgactggctaggctgctgagctggccctggctcccacaggcccttcctctccactgccttcgatacaccgggcctggagaactagagaaggacccggaggggcctggcagccgtgccttcagctctacagctaatcagcattctcactcctacctggtaatttaagattccagagagtggctcctcccggtgcccaagaatagatgctgactgtactcctcccaggcgccccttccccctccaatcccaccaaccctcagagccacccctaaagagatactttgatattttcaacgcagccctgctttgggctgccctggtgctgccacacttcaggctcttctcctttcacaaccttctgtggctcacagaacccttggagccaatggagactgtctcaagagggcactggtggcccgacagcctggcacagggcagtgggacagggcatggccaggtggccactccagacccctggcttttcactgctggctgccttagaacctttcttacattagcagtttgctttgtatgcactttgtttttttctttgggtcttgttttttttttccacttagaaattgcatttcctgacagaaggactcaggttgtctgaagtcactgcacagtgcatctcagcccacatagtgatggttcccctgttcactctacttagcatgtccctaccgagtctcttctccactggatggaggaaaaccaagccgtggcttcccgctcagccctccctgcccctcccttcaaccattccccatgggaaatgtcaacaagtatgaataaagacacctactgagtggc

SEQ ID NO: 72 - DNA, 2311 bp, Homo sapiens
cttgtcttcctcgtcctgctgttcctcggggccctcggactgtgtctggctggccgtaggagaaggagtgttcagtggtgcgccgtatcccaacccgaggccacaaaatgcttccaatggcaaaggaatatgagaaaagtgcgtggccctcctgtcagctgcataaagagagactcccccatccagtgtatccaggccattgcggaaaacagggccgatgctgtgacccttgatggtggtttcatatacgaggcaggcctggccccctacaaactgcgacctgtagcggcggaagtctacgggaccgaaagacagccacgaactcactattatgccgtggctgtggtgaagaagggcggcagctttcagctgaacgaactgcaaggtctgaagtcctgccacacaggccttcgcaggaccgctggatggaatgtccctatagggacacttcgtccattcttgaattggacgggtccacctgagcccattgaggcagctgtggccaggttcttctcagccagctgtgttcccggtgcagataaaggacagttccccaacctgtgtcgcctgtgtgcggggacaggggaaaacaaatgtgccttctcctcccaggaaccgtacttcagctactctggtgccttcaagtgtctgagagacggggctggagacgtggcttttatcagagagagcacagtgtttgaggacctgtcagacgaggctgaaagggacgagtatgagttactctgcccagacaacactcggaagccagtggacaagttcaaagactgccatctggcccgggtcccttctcatgccgttgtggcacgaagtgtgaatggcaaggaggatgccatctggaatcttctccgccaggcacaggaaaagtttggaaaggacaagtcaccgaaattccagctctttggctcccctagtgggcagaaagatctgctgttcaaggactctgccattgggttttcgagggtgcccccgaggatagattctgggctgtaccttggctccggctacttcactgccatccagaacttgaggaaaagtgaggaggaagtggctgcccggcgtgcgcgggtcgtgtggtgtgcggtgggcgagcaggagctgcgcaagtgtaaccagtggagtggcttgagcgaaggcagcgtgacctgctcctcggcctccaccacagaggactgcatcgccctggtgctgaaaggagaagctgatgccatgagtttggatggaggatatgtgtacactgcaggcaaatgtggtttggtgcctgtcctggcagagaactacaaatcccaacaaagcagtgaccctgatcctaactgtgtggatagacctgtggaaggatatcttgctgtggcggtggttaggagatcagacactagccttacctggaactctgtgaaaggcaagaagtcctgccacaccgccgtggacaggactgcaggctggaatatccccatgggcctgctcttcaaccagacgggctcctgcaaatttgatgaatatttcagtcaaagctgtgcccctgggtctgacccgagatctaatctctgtgctctgtgtattggcgacgagcagggtgagaataagtgcgtgcccaacagcaacgagagatactacggctacactggggctttccggtgcctggctgagaatgctggagacgttgcatttgtgaaagatgtcactgtcttgcagaacactgatggaaataacaatgaggcatgggctaaggatttgaagctggcagactttgcgctgctgtgcctcgatggcaaacggaagcctgtgactgaggctagaagctgccatcttgccatggccccgaatcatgccgtggtgtctcggatggataaggtggaacgcctgaaacaggtgttgctccaccaacaggctaaatttgggagaaatggatctgactgcccggacaagttttgcttattccagtctgaaaccaaaaaccttctgttcaatgacaacactgagtgtctggccagactccatggcaaaacaacatatgaaaaatatttgggaccacagtatgtcgcaggcattactaatctgaaaaagtgctcaacctcccccctcctggaagcctgtgaattcctcaggaagtaaaaccgaagaagatggcccagctccccaagaaagcctcagccattcactgcccccagctcttctccccaggtgtgttggggccttggctcccctgctgaaggtggggattgcccatccatctgcttacaattccctgctgtcgtcttagcaagaagtaaaatgagaaattttgttgatattc

SEQ ID NO: 73 - DNA, 4541 bp, Homo sapiens
ggatcctctagggtcccagctcgcctcgatggagctcctcccgccgctgcctcagtccttcctgttgctgctgctgttgcctgccaagcccgcggcgggcgaggactggcagtgcccgcgcaccccctacgcggcctctcgcgactttgacgtgaagtacgtggtgcccagcttctccgccggaggcctggtacaggccatggtgacctacgagggcgacagaaatgagagtgctgtgtttgtagccatacgcaatcgcctgcatgtgcttgggcctgacctgaagtctgtccagagcctggccacgggccctgctggagaccctggctgccagacgtgtgcagcctgtggcccaggaccccacggccctcccggtgacacagacacaaaggtgctggtgctggatcccgcgctgcctgcgctggtcagttgtggctccagcctgcagggccgctgcttcctgcatgacctagagccccaagggacagccgtgcatctggcagcgccagcctgcctcttctcagcccaccataaccggcccgatgactgccccgactgtgtggccagcccattgggcacccgtgtaactgtggttgagcaaggccaggcctcctatttctacgtggcatcctcactggacgcagccgtggctggcagcttcagcccacgctcagtgtctatcaggcgtctcaaggctgacgcctcgggattcgcaccgggctttgtggcgttgtcagtgctgcccaagcatcttgtctcctacagtattgaatacgtgcacagcttccacacgggagccttcgtatacttcctgactgtacagccggccagcgtgacagatgatcctagtgccctgcacacacgcctggcacggcttagcgccactgagccagagttgggtgactatcgggagctggtcctcgactgcagatttgctccaaaacgcaggcgccggggggccccagaaggcggacagccctaccctgtgctgcaggtggcccactccgctccagtgggtgcccaacttgccactgagctgagcatcgccgagggccaggaagtactatttggggtctttgtgactggcaaggatggtggtcctggcgtgggccccaactctgtcgtctgtgccttccccattgacctgctggacacactaattgatgagggtgtggagcgctgttgtgaatccccagtccatccaggcctccggcgaggcctcgacttcttccagtcgcccagtttttgccccaacccgcctggcctggaagccctcagccccaacaccagctgccgccacttccctctgctggtcagtagcagcttctcacgtgtggacctattcaatgggctgttgggaccagtacaggtcactgcattgtatgtgacacgccttgacaacgtcacagtggcacacatgggcacaatggatgggcgtatcctgcaggtggagctggtcaggtcactaaactacttgctgtatgtgtccaacttctcactgggtgacagtgggcagcccgtgcagcgggatgtcagtcgtcttggggaccacctactctttgcctctggggaccaggttttccaggtacctatccgaggccctggctgccgccacttcctgacctgtgggcgttgcctaagggcatggcatttcatgggctgtggctggtgtgggaacatgtgcggccagcagaaggagtgtcctggctcctggcaacaggaccactgcccacctaagcttactgagttccacccccacagtggacctctaaggggcagtacaaggctgaccctgtgtggctccaacttctaccttcacccttctggtctggtgcctgagggaacccatcaggtcactgtgggccaaagtccctgccggccactgcccaaggacagctcaaaactcagaccagtgccccggaaagactttgtagaggagtttgagtgtgaactggagcccttgggcacccaggcagtggggcctaccaacgtcagcctcaccgtgactaacatgccaccgggcaagcacttccgggtagacggcacctccgtgctgagaggcttctctttcatggagccagtgctgatagcagtgcaacccctctttggcccacgggcaggaggcacctgtctcactcttgaaggccagagtctgtctgtaggcaccagccgggctgtgctggtcaatgggactgagtgtctgctagcacgggtcagtgaggggcagcttttatgtgccacaccccctggggccacggtggccagtgtcccccttagcctgcaggtggggggtgcccaggtacctggttcctggaccttccagtacagagaagaccctgtcgtgctaagcatcagccccaactgtggctacatcaactcccacatcaccatctgtggccagcatctaacttcagcatggcacttagtgctgtcattccatgacgggcttagggcagtggaaagcaggtgtgagaggcagcttccagagcagcagctgtgccgccttcctgaatatgtggtccgagacccccagggatgggtggcagggaatctgagtgcccgaggggatggagctgctggctttacactgcctggctttcgcttcctacccccaccccatccacccagtgccaacctagttccactgaagcctgaggagcatgccattaagtttgagtatattgggctgggcgctgtggctgactgtgtgggtatcaacgtgaccgtgggtggtgagagctgccagcacgagttccggggggacatggttgtctgccccctgcccccatccctgcagcttggccaggatggtgccccattgcaggtctgcgtagatggtgaatgtcatatcctgggtagagtggtgcggccagggccagatggggtcccacagagcacgctccttggtatcctgctgcctttgctgctgcttgtggctgcactggcgactgcactggtcttcagctactggtggcggaggaagcagctagttcttcctcccaacctgaatgacctggcatccctggaccagactgctggagccacacccctgcctattctgtactcgggctctgactacagaagtggccttgcactccctgccattgatggtctggattccaccacttgtgtccatggagcatccttctccgatagtgaagatgaatcctgtgtgccactgctgcggaaagagtccatccagctaagggacctggactctgcgctcttggctgaggtcaaggatgtgctgattccccatgagcgggtggtcacccacagtgaccgagtcattggcaaaggccactttggagttgtctaccacggagaatacatagaccaggcccagaatcgaatccaatgtgccatcaagtcactaagtcgcatcacagagatgcagcaggtggaggccttcctgcgagaggggctgctcatgcgtggcctgaaccacccgaatgtgctggctctcattggtatcatgttgccacctgagggcctgccccatgtgctgctgccctatatgtgccacggtgacctgctccagttcatccgctcacctcagcggaaccccaccgtgaaggacctcatcagctttggcctgcaggtagcccgcggcatggagtacctggcagagcagaagtttgtgcacagggacctggctgcgcggaactgcatgctggacgagtcattcacagtcaaggtggctgactttggtttggcccgcgacatcctggacagggagtactatagtgttcaacagcatcgccacgctcgcctacctgtgaagtggatggcgctggagagcctgcagacctatagatttaccaccaagtctgatgtgtggtcatttggtgtgctgctgtgggaactgctgacacggggtgccccaccataccgccacattgacccttttgaccttacccacttcctggcccagggtcggcgcctgccccagcctgagtattgccctgattctctgtaccaagtgatgcagcaatgctgggaggcagacccagcagtgcgacccaccttcagagtactagtgggggaggtggagcagatagtgtctgcactgcttggggaccattatgtgcagctgccagcaacctacatgaacttgggccccagcacctcgcatgagatgaatgtgcgtccagaacagccgcagttctcacccatgccagggaatgtacgccggccccggccactctcagagcctcctcggcccacttgacttagttcttgggctggacctgcttagctgccttgagctaaccccaaggctgcctctgggccatgccaggccagagcagtggccctccaccttgttcctgccctttaactttcagaggcaataggtaaatgggcccattaggtccctcactccacagagtgagccagtgagggcagtcctgcaacatgtatttatggagtgcctgctgtggaccctgtcttctgggcacagtggactcagcagtgaccacaccaacactgacccttgaaccaataaaggaacaaatgactattaaagcacaaaaaaaaaa

SEQ ID NO: 74 - DNA, 1327 bp, Homo sapiens
gccgctgtgtaggaaagaagctaaagcacttccagagcctgtccggagctcagaggttcggaagacttatcgaccatggagcgcgcgtcctgcttgttgctgctgctgctgccgctggtgcacgtctctgcgaccacgccagaaccttgtgagctggacgatgaagatttccgctgcgtctgcaacttctccgaacctcagcccgactggtccgaagccttccagtgtgtgtctgcagtagaggtggagatccatgccggcggtctcaacctagagccgtttctaaagcgcgtcgatgcggacgccgacccgcggcagtatgctgacacggtcaaggctctccgcgtgcggcggctcacagtgggagccgcacaggttcctgctcagctactggtaggcgccctgcgtgtgctagcgtactcccgcctcaaggaactgacgctcgaggacctaaagataaccggcaccatgcctccgctgcctctggaagccacaggacttgcactttccagcttgcgcctacgcaacgtgtcgtgggcgacagggcgttcttggctcgccgagctgcagcagtggctcaagccaggcctcaaggtactgagcattgcccaagcacactcgcctgccttttcctgcgaacaggttcgcgccttcccggcccttaccagcctagacctgtctgacaatcctggactgggcgaacgcggactgatggcggctctctgtccccacaagttcccggccatccagaatctagcgctgcgcaacacaggaatggagacgcccacaggcgtgtgcgccgcactggcggcggcaggtgtgcagccccacagcctagacctcagccacaactcgctgcgcgccaccgtaaaccctagcgctccgagatgcatgtggtccagcgccctgaactccctcaatctgtcgttcgctgggctggaacaggtgcctaaaggactgccagccaagctcagagtgctcgatctcagctgcaacagactgaacagggcgccgcagcctgacgagctgcccgaggtggataacctgacactggacgggaatcccttcctggtccctggaactgccctcccccacgagggctcaatgaactccggcgtggtcccagcctgtgcacgttcgaccctgtcggtgggggtgtcgggaaccctggtgctgctccaaggggcccggggctttgcctaagatccaagacagaataatgaatggactcaaactgccttggcttcaggggagtcccgtcaggacgttgaggacttttcgaccaattcaaccctttgccccacctttattaaaatcttaaacaacg

SEQ ID NO: 75 - DNA, 442 bp, Homo sapiens
  modified_base (348): a, t, c, g, other or unknown
cgtttaacaaaattgtttaataaaatttataaaaatgcatctttgagaatacttttctcagcttgaattgttttccttttccacccccaaagaaaatacacaattatcagcacccacacatgtatacactcaaaactacagtgacattctctacacagaactatattcgatatagcttgaactgccgaaaaatcaagacaattccaaaaagtgattgcagggttgatttttttctccaaaacactttgagaaacacgtaaagctatttcaacaaaagtcttttctttgattgtcaaaagttgaaattcacatttaaataaaaagagatccaaatcaagatcctcactnaccccctacccctcaactgaacccccttttagggccacattttcttcttgctcctaagaaaaaaatttggaattttgaatattctcggttttct

SEQ ID NO: 76 - DNA, 3151 bp, Homo sapiens
ccggccagcgggcgggctccccagccaggccgctgcacctgtcaggggaacaagctggaggagcaggaccctagacctctgcagcccataccaggtctcatggaggggaacaagctggaggagcaggactctagccctccacagtccactccagggctcatgaaggggaacaagcgtgaggagcaggggctgggccccgaacctgcggcgccccagcagcccacggcggaggaggaggccctgatcgagttccaccgctcctaccgagagctcttcgagttcttctgcaacaacaccaccatccacggcgccatccgcctggtgtgctcccagcacaaccgcatgaagacggccttctgggcagtgctgtggctctgcacctttggcatgatgtactggcaattcggcctgcttttcggagagtacttcagctaccccgtcagcctcaacatcaacctcaactcggacaagctcgtcttccccgcagtgaccatctgcaccctcaatccctacaggtacccggaaattaaagaggagctggaggagctggaccgcatcacagagcagacgctctttgacctgtacaaatacagctccttcaccactctcgtggccggctcccgcagccgtcgcgacctgcgggggactctgccgcaccccttgcagcgcctgagggtcccgcccccgcctcacggggcccgtcgagcccgtagcgtggcctccagcttgcgggacaacaacccccaggtggactggaaggactggaagatcggcttccagctgtgcaaccagaacaaatcggactgcttctaccagacatactcatcaggggtggatgcggtgagggagtggtaccgcttccactacatcaacatcctgtcgaggctgccagagactctgccatccctggaggaggacacgctgggcaacttcatcttcgcctgccgcttcaaccaggtctcctgcaaccaggcgaattactctcacttccaccacccgatgtatggaaactgctatactttcaatgacaagaacaactccaacctctggatgtcttccatgcctggaatcaacaacggtctgtccctgatgctgcgcgcagagcagaatgacttcattcccctgctgtccacagtgactggggcccgggtaatggtgcacgggcaggatgaacctgcctttatggatgatggtggctttaacttgcggcctggcgtggagacctccatcagcatgaggaaggaaaccctggacagacttgggggcgattatggcgactgcaccaagaatggcagtgatgttcctgttgagaacctttacccttcaaagtacacacagcaggtgtgtattcactcctgcttccaggagagcatgatcaaggagtgtggctgtgcctacatcttctatccgcggccccagaacgtggagtactgtgactacagaaagcacagttcctgggggtactgctactataagctccaggttgacttctcctcagaccacctgggctgtttcaccaagtgccggaagccatgcagcgtgaccagctaccagctctctgctggttactcacgatggccctcggtgacatcccaggaatgggtcttccagatgctatcgcgacagaacaattacaccgtcaacaacaagagaaatggagtggccaaagtcaacatcttcttcaaggagctgaactacaaaaccaattctgagtctccctctgtcacgatggtcaccctcctgtccaacctgggcagccagtggagcctgtggttcggctcctcggtgttgtctgtggtggagatggctgagctcgtctttgacctgctggtcatcatgttcctcatgctgctccgaaggttccgaagccgatactggtctccaggccgagggggcaggggtgctcaggaggtagcctccaccctggcatcctcccctccttcccacttctgcccccaccccatgtctctgtccttgtcccagccaggccctgctccctctccagccttgacagcccctccccctgcctatgccaccctgggcccccgcccatctccagggggctctgcaggggccagttcctccacctgtcctctgggggggccctgagagggaaggagaggtttctcacaccaaggcagatgctcctctggtgggagggtgctggccctggcaagattgaaggatgtgcagggcttcctctcagagccgcccaaactgccgttgatgtgtggaggggaagcaagatgggtaagggctcaggaagttgctccaagaacagtagctgatgaagctgcccagaagtgccttggctccagccctgtaccccttggtactgcctctgaacactctggtttccccacccaactgcggctaagtctctttttcccttggatcagccaagcgaaacttggagctttgacaaggaactttcctaagaaaccgctgataaccaggacaaaacacaaccaagggtacacgcaggcatgcacgggtttcctgcccagcgacggcttaagccagcccccgactggcctggccacactgctctccagtagcacagatgtctgctcctcctcttgaacttgggtgggaaaccccacccaaaagccccctttgttacttaggcaattccccttccctgactcccgagggctagggctagagcagacccgggtaagtaaaggcagacccagggctcctctagcctcatacccgtgccctcacagagccatgccccggcacctctgccctgtgtctttcatacctctacatgtctgcttgagatatttcctcagcctgaaagtttccccaaccatctgccagagaactcctatgcatcccttagaaccctgctcagacaccattacttttgtgaacgcttctgccacatcttgtcttccccaaaattgatcactccgccttctcctgggctcccgtagcacactataacatctgctggagtgttgctgttgcaccatactttcttgtacatttgtgtctcccttcccaactagactgtaagtgccttgcggtcagggactgaatcttgcccgtttatgtatgctccatgtctagcccatcatcctgcttggagcaagtaggcaggagctcaataaatgtttgttgcatgaaaaaaaaaaaaaaaaaa

SEQ ID NO: 77 - DNA, 1551 bp, Homo sapiens
ctggtggcctttaatacctggctgttgctgaaaggtctttagaaacggcgctaacagcaggtttgtggaatgccggatcgctcaacggcctgacgtgggcaaaaacctcgccttccgcacccatcattatattgatgctcattgccgccgccttactggtacgccggatgcgcttgctggaaatgggacacacggtcactgcagctgaagccgctgcccctgctacaggcaccaccaggaccagctgatcattccagcccacagcaatggagccacatgactcctcccacatggactctgagttccgatacactctcttcccgattgtttacagcatcatctttgtgctcggggtcattgctaatggctacgtgctgtgggtctttgcccgcctgtacccttgcaagaaattcaatgagataaagatcttcatggtgaacctcaccatggcggacatgctcttcttgatcaccctgccactttggattgtctactaccaaaaccagggcaactggatactccccaaattcctgtgcaacgtggctggctgccttttcttcatcaacacctactgctctgtggccttcctgggcgtcatcacttataaccgcttccaggcagtaactcggcccatcaagactgctcaggccaacacccgcaagcgtggcatctctttgtccttggtcatctgggtggccattgtgggagctgcatcctacttcctcatcctggactccaccaacacagtgcccgacagtgctggctcaggcaacgtcactcgctgctttgagcattacgagaagggcagcgtgccagtcctcatcatccacatcttcatcgtgttcagcttcttcctggtcttcctcatcatcctcttctgcaacctggtcatcatccgtaccttgctcatgcagccggtgcagcagcagcgcaacgctgaagtcaagcgccgggcgctgtggatggtgtgcacggtcttggcggtgttcatcatctgcttcgtgccccaccacgtggtgcagctgccctggacccttgctgagctgggcttccaggacagcaaattccaccaggccattaatgatgcacatcaggtcaccctctgcctccttagcaccaactgtgtcttagaccctgttatctactgtttcctcaccaagaagttccgcaagcacctcaccgaaaagttctacagcatgcgcagtagccggaaatgctcccgggccaccacggatacggtcactgaagtggttgtgccattcaaccagatccctggcaattccctcaaaaattagtccctgcttccaggcctgaagtcttctcctccatgaacatcatggactgagctgggggaagaagggatatctactgtggtctgggcaccacctctgtgggcactggtgggccattagatttggaggctacctcacctgggcagggatgatggcagagccaggctgttggaaaatccagaactcaaatgagccccttcatccgcctgtggggcatactacagtaactgtgacttgatgactttatctgagtccttat

SEQ ID NO: 78 - DNA, 1457 bp, Homo sapiens
accagcggcagaccacaggcagggcagaggcacgtctgggtcccctccctccttcctatcggcgactcccagatcctggccatgagagctccgcacctccacctctccgccgcctctggcgcccgggctctggcgaagctgctgccgctgctgatggcgcaactctgggccgcagaggcggcgctgctcccccaaaacgacacgcgcttggaccccgaagcctatggcgccccgtgcgcgcgcggctcgcagccctggcaggtctcgctcttcaacggcctctcgttccactgcgcgggtgtcctggtggaccagagttgggtgctgacggccgcgcactgcggaaacaagccactgtgggctcgagtaggggatgatcacctgctgcttcttcagggcgagcagctccgccggacgactcgctctgttgtccatcccaagtaccaccagggctcaggccccatcctgccaaggcgaacggatgagcacgatctcatgttgctaaagctggccaggcccgtagtgccggggccccgcgtccgggccctgcagcttccctaccgctgtgctcagcccggagaccagtgccaggttgctggctggggcaccacggccgcccggagagtgaagtacaacaagggcctgacctgctccagcatcactatcctgagccctaaagagtgtgaggtcttctaccctggcgtggtcaccaacaacatgatatgtgctggactggaccggggccaggacccttgccagagtgactctggaggccccctggtctgtgacgagaccctccaaggcatcctctcgtggggtgtttacccctgtggctctgcccagcatccagctgtctacacccagatctgcaaatacatgtcctggatcaataaagtcatagctccaactgatccagatgctacgctccagctgatccagatgttatgctcctgctgatccagatgcccagaggctccatcgtccatcctcttcctccccagtcggctgaactctccccttgtctgcactgttcaaacctctgccgccctccacacctctaaacatctcccctctcacctcattcccccacctatccccattctctgcctgtactgaagctgaaatgcaggaagtggtggcaaaggtttattccagagaagccaggaagccggtcatcacccagcctctgagagcagttactggggtcacccaacctgacttcctctgccactccccgctgtgtgactttgggcaagccaagtgccctctctgaacctcagtttcctcatctgcaaaatgggaacaatgacgtgcctacctcttagacatgttgtgaggagactatgatataacatgtgtatgtaaatcttcatgtgattgtcatgtaaggcttaacacagtgggtggtgagttctgactaaaggttacctgttgtcgtgaaaaaaaaaaaaaaaaaa

SEQ ID NO: 79 - DNA, 423 bp, Homo sapiens
actctgcttacattttataagtttaaggtcagctgtcaaaaggataacctgtggggttagaacatatcacattgcaacaccctaaattgtttttaatacattagcaatctattgggtcaactgacatccattgtatatactagtttctttcatgctatttttattttgttttttgcatttttatcaaatgcagggcccctttctgatctcaccatttcaccatgcatcttggaattcagtaagtgcatatcctaacttgcccatattctaaatcatctggttggttttcagcctagaatttgatacgctttttagaaatatgcccagaatagaaaagctatgttggggcacatgtcctgcaaatatggccctagaaacaagtgatatggaatttacttggtgaataagttataaattcccact

SEQ ID NO: 80 - DNA, 347 bp, Homo sapiens
  modified_base (1): a, t, c, g, other or unknown
  modified_base (7): a, t, c, g, other or unknown
  modified_base (26): a, t, c, g, other or unknown
  modified_base (31): a, t, c, g, other or unknown
  modified_base (124): a, t, c, g, other or unknown
ntgaggntgagaactttataccaccnttgtnacactacaccgtgattttaaatctttaatcaaattccaaaggttatcagccatattacatgccatgattagctttctataagcaatttttttnactgtgtacagatcggtgtcaatgaaataaaaaaataaaactgtatactagggcaaagaactttattaatctttgtttcaaacttgattcccagggcttcttcgggcttaattaggctgcaaaggaatgaattgtgtataaggcaaaaactgaaaaggaggctggcagtgtccaagggggcttgggggcttaaaaatattaggaggatcccaggattttatcc

SEQ ID NO: 81 - DNA, 4473 bp, Homo sapiens
aaggggaggtaaccctggcccctttggtcggggccccgggcagccgcgcgccccttcccacggggccctttactgcgccgcgcgcccggcccccacccctcgcagcaccccgcgccccgcgccctcccagccgggtccagccggagccatggggccggagccgcagtgagcaccatggagctggcggccttgtgccgctgggggctcctcctcgccctcttgccccccggagccgcgagcacccaagtgtgcaccggcacagacatgaagctgcggctccctgccagtcccgagacccacctggacatgctccgccacctctaccagggctgccaggtggtgcagggaaacctggaactcacctacctgcccaccaatgccagcctgtccttcctgcaggatatccaggaggtgcagggctacgtgctcatcgctcacaaccaagtgaggcaggtcccactgcagaggctgcggattgtgcgaggcacccagctctttgaggacaactatgccctggccgtgctagacaatggagacccgctgaacaataccacccctgtcacaggggcctccccaggaggcctgcgggagctgcagcttcgaagcctcacagagatcttgaaaggaggggtcttgatccagcggaacccccagctctgctaccaggacacgattttgtggaaggacatcttccacaagaacaaccagctggctctcacactgatagacaccaaccgctctcgggcctgccacccctgttctccgatgtgtaagggctcccgctgctggggagagagttctgaggattgtcagagcctgacgcgcactgtctgtgccggtggctgtgcccgctgcaaggggccactgcccactgactgctgccatgagcagtgtgctgccggctgcacgggccccaagcactctgactgcctggcctgcctccacttcaaccacagtggcatctgtgagctgcactgcccagccctggtcacctacaacacagacacgtttgagtccatgcccaatcccgagggccggtatacattcggcgccagctgtgtgactgcctgtccctacaactacctttctacggacgtgggatcctgcaccctcgtctgccccctgcacaaccaagaggtgacagcagaggatggaacacagcggtgtgagaagtgcagcaagccctgtgcccgagtgtgctatggtctgggcatggagcacttgcgagaggtgagggcagttaccagtgccaatatccaggagtttgctggctgcaagaagatctttgggagcctggcatttctgccggagagctttgatggggacccagcctccaacactgccccgctccagccagagcagctccaagtgtttgagactctggaagagatcacaggttacctatacatctcagcatggccggacagcctgcctgacctcagcgtcttccagaacctgcaagtaatccggggacgaattctgcacaatggcgcctactcgctgaccctgcaagggctgggcatcagctggctggggctgcgctcactgagggaactgggcagtggactggccctcatccaccataacacccacctctgcttcgtgcacacggtgccctgggaccagctctttcggaacccgcaccaagctctgctccacactgccaaccggccagaggacgagtgtgtgggcgagggcctggcctgccaccagctgtgcgcccgagggcactgctggggtccagggcccacccagtgtgtcaactgcagccagttccttcggggccaggagtgcgtggaggaatgccgagtactgcaggggctccccagggagtatgtgaatgccaggcactgtttgccgtgccaccctgagtgtcagccccagaatggctcagtgacctgttttggaccggaggctgaccagtgtgtggcctgtgcccactataaggaccctcccttctgcgtggcccgctgccccagcggtgtgaaacctgacctctcctacatgcccatctggaagtttccagatgaggagggcgcatgccagccttgccccatcaactgcacccactcctgtgtggacctggatgacaagggctgccccgccgagcagagagccagccctctgacgtccatcatctctgcggtggttggcattctgctggtcgtggtcttgggggtggtctttgggatcctcatcaagcgacggcagcagaagatccggaagtacacgatgcggagactgctgcaggaaacggagctggtggagccgctgacacctagcggagcgatgcccaaccaggcgcagatgcggatcctgaaagagacggagctgaggaaggtgaaggtgcttggatctggcgcttttggcacagtctacaagggcatctggatccctgatggggagaatgtgaaaattccagtggccatcaaagtgttgagggaaaacacatcccccaaagccaacaaagaaatcttagacgaagcatacgtgatggctggtgtgggctccccatatgtctcccgccttctgggcatctgcctgacatccacggtgcagctggtgacacagcttatgccctatggctgcctcttagaccatgtccgggaaaaccgcggacgcctgggctcccaggacctgctgaactggtgtatgcagattgccaaggggatgagctacctggaggatgtgcggctcgtacacagggacttggccgctcggaacgtgctggtcaagagtcccaaccatgtcaaaattacagacttcgggctggctcggctgctggacattgacgagacagagtaccatgcagatgggggcaaggtgcccatcaagtggatggcgctggagtccattctccgccggcggttcacccaccagagtgatgtgtggagttatggtgtgactgtgtgggagctgatgacttttggggccaaaccttacgatgggatcccagcccgggagatccctgacctgctggaaaagggggagcggctgccccagccccccatctgcaccattgatgtctacatgatcatggtcaaatgttggatgattgactctgaatgtcggccaagattccgggagttggtgtctgaattctcccgcatggccagggacccccagcgctttgtggtcatccagaatgaggacttgggcccagccagtcccttggacagcaccttctaccgctcactgctggaggacgatgacatgggggacctggtggatgctgaggagtatctggtaccccagcagggcttcttctgtccagaccctgccccgggcgctgggggcatggtccaccacaggcaccgcagctcatctaccaggagtggcggtggggacctgacactagggctggagccctctgaagaggaggcccccaggtctccactggcaccctccgaaggggctggctccgatgtatttgatggtgacctgggaatgggggcagccaaggggctgcaaagcctccccacacatgaccccagccctctacagcggtacagtgaggaccccacagtacccctgccctctgagactgatggctacgttgcccccctgacctgcagcccccagcctgaatatgtgaaccagccagatgttcggccccagcccccttcgccccgagagggccctctgcctgctgcccgacctgctggtgccactctggaaaggcccaagactctctccccagggaagaatggggtcgtcaaagacgtttttgcctttgggggtgccgtggagaaccccgagtacttgacaccccagggaggagctgcccctcagccccaccctcctcctgccttcagcccagccttcgacaacctctattactgggaccaggacccaccagagcggggggctccacccagcaccttcaaagggacacctacggcagagaacccagagtacctgggtctggacgtgccagtgtgaaccagaaggccaagtccgcagaagccctgatgtgtcctcagggagcagggaaggcctgacttctgctggcatcaagaggtgggagggccctccgaccacttccaggggaacctgccatgccaggaacctgtcctaaggaaccttccttcctgcttgagttcccagatggctggaaggggtccagcctcgttggaagaggaacagcactggggagtctttgtggattctgaggccctgcccaatgagactctagggtccagtggatgccacagcccagcttggccctttccttccagatcctgggtactgaaagccttagggaagctggcctgagaggggaagcggccctaagggagtgtctaagaacaaaagcgacccattcagagactgtccctgaaacctagtactgccccccatgaggaaggaacagcaatggtgtcagtatccaggctttgtacagagtgcttttctgtttagtttttactttttttgttttgtttttttaaagatgaaataaagacccagggggag

SEQ ID NO: 82 - DNA, 4198 bp, Homo sapiens
ctgctatcaaaaaggccataaggattttgtccccaaatttcacatgagctaccttgcttcaaactactgagatgaagggggcaagattatttgtccttctttctagtttatggagtgggggcattgggcttaacaacagtaagcattcttggactatacctgaggatgggaactctcagaagactatgccttctgcttcagttcctccaaataaaatacaaagtttgcaaatactgccaaccactcgggtcatgtcggcggagatagctacaactccagaggcaagaacttctgaagacagtcttcttaaatcaacactgcctccctcagaaacaagtgcacctgctgagggtgtgagaaatcaaactctcacatccacagagaaagcagaaggagtggtcaagttacagaatcttaccctcccaaccaacgctagcatcaagttcaatcctggagcagaatcagtggtcctttccaattctacactgaaatttcttcagagctttgccagaaagtcaaatgaacaagcaacttctctaaacacagttggaggcactggaggcattggaggcgttggaggcactggaggcgtgggaaatcgagccccacgggaaacatacctcagccggggtgacagcagttccagccaaagaactgactaccaaaaatcaaatttcgaaacaactagaggaaagaattggtgtgcttatgtacataccaggttatctcccacagtgacattggacaaccaggtcacttatgtcccaggtgggaaaggaccttgtggctggaccggtggatcctgtcctcagagatctcagaagatatccaatcctgtctataggatgcaacataaaattgtcacctcattggattggaggtgctgtcctggatacagtgggccgaaatgtcaactaagagcccaggaacagcaaagtttgatacacaccaaccaggctgaaagtcatacagctgttggcagaggagtagctgagcagcagcagcagcaaggctgtggtgacccagaagtgatgcaaaaaatgactgatcaggtgaactaccaggcaatgaaactgactcttctgcagaagaagattgacaatatttctttgactgtgaatgatgtaaggaacacttactcctccctagaaggaaaagtcagcgaagataaaagcagagaatttcaatctcttctaaaaggtctaaaatccaaaagcattaatgtactgataagagacatagtaagagaacaatttaaaatttttcaaaatgacatgcaagagactgtagcacagctcttcaagactgtatcaagtctatcagaggacctcgaaagcaccaggcaaataattcaaaaagttaatgaatctgtggtttcaatagcagcccagcaaaagtttgttttggtgcaagagaatcggcccactttgactgatatagtggaactaaggaatcacattgtgaatgtaaggcaagaaatgactcttacatgtgagaagcctattaaagaactagaagtaaagcagactcatttagaaggtgctctagaacaggaacactcaagaagcattctgtattatgaatccctcaataaaactctttctaaattgaaggaagtacatgagcagcttttatcaactgaacaggtatcagaccagaagaatgctccagctgctgagtcagttagcaataatgtcactgagtacatgtctactttacatgaaaatataaagaagcagagtttgatgatgctgcaaatgtttgaagatttgcacattcaagaaagcaagattaacaatctcaccgtctctttggagatggagaaagagtctctcagaggtgaatgtgaagacatgttatccaaatgcagaaatgattttaaatttcaacttaaggacacagaagagaatttacatgtgttaaatcaaacattggctgaagttctctttccaatggacaataagatggacaaaatgagtgagcaactaaatgatttgacttatgatatggagatccttcaacccttgcttgagcagggagcatcactcagacagacaatgacatatgaacaaccaaaggaagcaatagtgataaggaaaaagatagaaaatctgactagtgctgtcaatagtctaaattttattatcaaagaacttacaaaaagacacaacttacttagaaatgaagtacagggtcgtgatgatgccttagaaagacgtatcaatgaatatgccttagaaatggaagatggcctcaataagacaatgactattataaataatgctattgatttcattcaagataactatgccctaaaagagactttaagtactattaaggataatagtgagatccatcataaatgtacctccgatatggaaactattttgacatttattcctcagttccaccgtctgaatgattctattcagactttggtcaatgacaatcagagatataactttgttttgcaagtcgccaagacccttgcaggtattcccagagatgagaaactaaatcagtccaacttccaaaagatgtatcaaatgttcaatgaaaccacttcccaagtgagaaaataccagcaaaatatgagtcatttggaagaaaaactactcttaactaccaagatttccaaaaattttgagactcggttgcaagacattgagtctaaagttacccagacgctcataccttattatatttcagttaaaaaaggcagtgtagttacaaatgagagagatcaggctcttcaactgcaagtattaaattccagatttaaggcgttggaagcaaaatctatccatctttcaattaacttcttttcgcttaacaaaactctccacgaagttttaacaatgtgtcacaatgcttctacaagtgtgtcagaactgaatgctaccatccctaagtggataaaacattccctgccagatattcaacttcttcagaaaggtctaacagaatttgtggaaccaataattcaaataaaaactcaagctgccctatctaattcaacttgttgtatagatcgatcgttgcctggtagtctggcaaatgttgtcaagtctcagaagcaagtaaaatcattgccaaagaaaattaacgcacttaagaaaccaacggtaaatcttaccacagtcctgataggccggactcaaagaaacacggacaacataatatatcctgaggagtattcaagctgtagtcggcatccgtgccaaaatgggggcacgtgcataaatggaagaactagctttacctgtgcctgcagacatccttttactggtgacaactgcactatcaagcttgtggaagaaaatgctttagctccagatttttccaaaggatcttacagatatgcacccatggtggcattttttgcatctcatacgtatggaatgactatacctggtcctatcctgtttaataacttggatgtcaattatggagcttcatataccccaagaactggaaaatttagaattccgtatcttggagtatatgttttcaagtacaccatcgagtcatttagtgctcatatttctggatttttagtggttgatggaatagacaagcttgcatttgagtctgaaaatattaacagtgaaatacactgtgatagggttttaactggggatgccttattagaattaaattatgggcaggaagtctggttacgacttgcaaaaggaacaattccagccaagtttccccctgttactacatttagtggctatttattatatcgtacataagttagtatgaaaaacagactatcacctttattgagaaacagccagtgttttcatttatctttgcttgcacatctgctctgttttggtttttctacaggaaatgaaaatcaacttgtttttttaatatgagtaaacttgtatgtctattttataaaattatttgaatattgtttaatgtctgaatatgaaagagttcttgatcctaaagaaatttagtggcacagaaaacaaagtgaatttgttagcataattattcctattcttatttcttcattttaagtcattgcaatggaaagtaatattataaaacggtaattacaacatattatcagtcacagttttctttccaattaaacacttaacttttgttattccctgtatataaatatataacacacattttctagattcacaaatttaaataaattactcaaaaaatg

SEQ ID NO: 83 - DNA, 1716 bp, Homo sapiens
cggcgccagcagcggagccaacgcacccgagtttgtgtttgaggccaccctgaggatcgggacagctgttcctttgggctgcagaaactccgctgagcagaacttgccgccagaatgctcctcctgttgctgagtatcatcgtcctccacgtcgcggtgctggtgctgctgttcgtctccacgatcgtcagccaatggatcgtgggcaatggacacgcaactgatctctggcagaactgtagcacctcttcctcaggaaatgtccaccactgtttctcatcatcaccaaacgaatggctgcagtctgtccaggccaccatgatcctgtcgatcatcttcagcattctgtctctgttcctgttcttctgccaactcttcaccctcaccaaggggggcaggttttacatcactggaatcttccaaattcttgctggtctgtgcgtgatgagtgctgcggccatctacacggtgaggcacccggagtggcatctcaactcggattactcctacggtttcgcctacatcctggcctgggtggccttccccctggcccttctcagcggtgtcatctatgtgatcttgcggaaacgcgaatgaggcgcccagacggtctgtctgaggctctgagcgtacatagggaagggaggaagggaaaccagaaagcagacaaagaaaaaagagctagcccaaaatcccaaactcaaaccaaacagaaagcagtggaggtgggggttgctgttgattgaagatgtatataatatctccggtttataaaacctatttataacactttttacatatatgtacatagtattgtttgctttttatgttgaccatcagcctcgtgttgagccttaaagaagtagctaaggaactttacatcctaacagtataatccagctcagtatttttgttttgttttttgtttgtttgttttgttttacccagaaataagataactccatctcgccccttccctttcatctgaaagaagatacctccctcccagtccacctcatttagaaaaccaaagtgtgggtagaaaccccaaatgtccaaaagcccttttctggtgggtgacccagtgcatccaacagaaacagccgctgcccgaacctctgtgtgaagctttacgcgcacacggacaaaatgcccaaactggagcccttgcaaaaacacggcttgtggcattggcatacttgcccttacaggtggagtatcttcgtcacacatctaaatgagaaatcagtgacaacaagtctttgaaatggtgctatggatttaccattccttattatcactaatcatctaaacaactcactggaaatccaattaacaattttacaacataagatagaatggagacctgaataattctgtgtaatataaatggtttataactgcttttgtacctagctaggctgctattattactataatgagtaaatcataaagccttcatcactcccacatttttcttacggtcggagcatcagaacaagcgtctagactccttgggaccgtgagttcctagagcttggctgggtctaggctgttctgtgcctccaaggactgtctggcaatgacttgtattggccaccaactgtagatgtatatatggtgcccttctgatgctaagactccagaccttttgtttttgctttgcattttctgattttataccaactgtgtggactaagatgcattaaaataaac

SEQ ID NO: 84 - DNA, 363 bp, Homo sapiens
gcgaccgcgctgggcctcgtgtcgcttgtcgtcgtccgtcctgtgggcgctctgccctgtgtccttcgcgttcctcgttaagcagaagaagtcagtagttattctcccatgaacgttcttgtctgtgtacagtttttagaacattacaaaggatctgtttgcttagctgtcaacaaaaagaaaacctgaaggagcatttggaagtcaatttgaggtttttttttttttttttttttttttgtatgttggaacgtgccccagaatgaggcagttggcaaacttctcaggacaatgaatccttcccgtttttctttttatgccacacagtgcattgttttttctacctgcttgtcttatttttag

SEQ ID NO: 85 - DNA, 549 bp, Homo sapiens
aaaatggtcgctacagcatctctcggacggaggccgctgacctctgcaaggctttcaatagcaccttgcccacaatggcccagatggagaaagctctgagcatcggatttgagacctgcaggtatgggttcatagaagggcacgtggtgattccccggatccaccccaactccatctgtgcagcaaacaacacaggggtgtacatcctcacatccaacacctcccagtatgacacatattgcttcaatgcttcagctccacctgaagaagattgtacatcagtcacagacctgcccaatgcctttgatggaccaattaccataactattgttaaccgtgatggcacccgctatgtccagaaaggagaatacagaacgaatcctgaagacatctaccccagcaaccctactggatgatgacgtgagcagcggctcctccagtgaaaggagcagcacttcaggaggttacatcttttacactttttctactgtacacccatcccagacgaagacagtccttggatcacgacagcacagcagatcctgctac

SEQ ID NO: 86 - DNA, 8091 bp, Homo sapiens
acgcggcgcggaggctggcccgggacgcgcccggagcccagggaaggagggaggaggggagggtcgcggccggccgccatggggccgggggcccgtggccgccgccgccgccgtcgcccgatgtcgccgccaccgccaccgccacccgtgcgggcgctgcccctgctgctgctgctagcggggccgggggctgcagcccccccttgcctggacggaagcccgtgtgcaaatggaggtcgttgcacccagctgccctcccgggaggctgcctgcctgtgcccgcctggctgggtgggtgagcggtgtcagctggaggacccctgtcactcaggcccctgtgctggccgtggtgtctgccagagttcagtggtggctggcaccgcccgattctcatgccggtgcccccgtggcttccgaggccctgactgctccctgccagatccctgcctcagcagcccttgtgcccacggtgcccgctgctcagtggggcccgatggacgcttcctctgctcctgcccacctggctaccagggccgcagctgccgaagcgacgtggatgagtgccgggtgggtgagccctgccgccatggtggcacctgcctcaacacacctggctccttccgctgccagtgtccagctggctacacagggccactatgtgagaaccccgcggtgccctgtgcgccctcaccatgccgtaacgggggcacctgcaggcagagtggcgacctcacttacgactgtgcctgtcttcctgggtttgagggtcagaattgtgaagtgaacgtggacgactgtccaggacaccgatgtctcaatggggggacatgcgtggatggcgtcaacacctataactgccagtgccctcctgagtggacaggccagttctgcacggaggacgtggatgagtgtcagctgcagcccaacgcctgccacaatgggggtacctgcttcaacacgctgggtggccacagctgcgtgtgtgtcaatggctggacaggtgagagctgcagtcagaatatcgatgactgtgccacagccgtgtgcttccatggggccacctgccatgaccgcgtggcttctttctactgtgcctgccccatgggcaagactggcctcctgtgtcacctggatgacgcctgtgtcagcaacccctgccacgaggatgctatctgtgacacaaatccggtgaacggccgggccatttgcacctgtcctcccggcttcacgggtggggcatgtgaccaggatgtggacgagtgctctatcggcgccaacccctgcgagcacttgggcaggtgcgtgaacacgcagggctccttcctgtgccagtgcggtcgtggctacactggacctcgctgtgagaccgatgtcaacgagtgtctgtcggggccctgccgaaaccaggccacgtgcctcgaccgcataggccagttcacctgtatctgtatggcaggcttcacaggaacctattgcgaggtggacattgacgagtgtcagagtagcccctgtgtcaacggtggggtctgcaaggaccgagtcaatggcttcagctgcacctgcccctcgggcttcagcggctccacgtgtcagctggacgtggacgaatgcgccagcacgccctgcaggaatggcgccaaatgcgtggaccagcccgatggctacgagtgccgctgtgccgagggctttgagggcacgctgtgtgatcgcaacgtggacgactgctcccctgacccatgccaccatggtcgctgcgtggatggcatcgccagcttctcatgtgcctgtgctcctggctacacgggcacacgctgcgagagccaggtggacgaatgccgcagccagccctgccgccatggcggcaaatgcctagacctggtggacaagtacctctgccgctgcccttctgggaccacaggtgtgaactgcgaagtgaacattgacgactgtgccagcaacccctgcacctttggagtctgccgtgatggcatcaaccgctacgactgtgtctgccaacctggcttcacagggcccctttgtaacgtggagatcaatgagtgtgcttccagcccatgcggcgagggaggttcctgtgtggatggggaaaatggcttccgctgcctctgcccgcctggctccttgcccccactctgcctccccccgagccatccctgtgcccatgagccctgcagtcacggcatctgctatgatgcacctggcgggttccgctgtgtgtgtgagcctggctggagtggcccccgctgcagccagagcctggcccgagacgcctgtgagtcccagccgtgcagggccggtgggacatgcagcagcgatggaatgggtttccactgcacctgcccgcctggtgtccagggacgtcagtgtgaactcctctccccctgcaccccgaacccctgtgagcatgggggccgctgcgagtctgcccctggccagctgcctgtctgctcctgcccccagggctggcaaggcccacgatgccagcaggatgtggacgagtgtgctggccccgcaccctgtggccctcatggtatctgcaccaacctggcagggagtttcagctgcacctgccatggagggtacactggcccttcctgtgatcaggacatcaatgactgtgaccccaacccatgcctgaacggtggctcgtgccaagacggcgtgggctccttttcctgctcctgcctccctggtttcgccggcccacgatgcgcccgcgatgtggatgagtgcctgagcaacccctgcggcccgggcacctgtaccgaccacgtggcctccttcacctgcacctgcccgccgggctacggaggcttccactgcgaacaggacctgcccgactgcagccccagctcctgcttcaatggcgggacctgtgtggacggcgtgaactcgttcagctgcctgtgccgtcccggctacacaggagcccactgccaacatgaggcagacccctgcctctcgcggccctgcctacacgggggcgtctgcagcgccgcccaccctggcttccgctgcacctgcctcgagagcttcacgggcccgcagtgccagacgctggtggattggtgcagccgccagccttgtcaaaacgggggtcgctgcgtccagactggggcctattgcctttgtccccctggatggagcggacgcctctgtgacatccgaagcttgccctgcagggaggccgcagcccagatcggggtgcggctggagcagctgtgtcaggcgggtgggcagtgtgtggatgaagacagctcccactactgcgtgtgcccagagggccgtactggtagccactgtgagcaggaggtggacccctgcttggcccagccctgccagcatggggggacctgccgtggctatatggggggctacatgtgtgagtgtcttcctggctacaatggtgataactgtgaggacgacgtggacgagtgtgcctcccagccctgccagcacgggggttcatgcattgacctcgtggcccgctatctctgctcctgtcccccaggaacgctgggggtgctctgcgagattaatgaggatgactgcggcccaggcccaccgctggactcagggccccggtgcctacacaatggcacctgcgtggacctggtgggtggtttccgctgcacctgtcccccaggatacactggtttgcgctgcgaggcagacatcaatgagtgtcgctcaggtgcctgccacgcggcacacacccgggactgcctgcaggacccaggcggaggtttccgttgcctttgtcatgctggcttctcaggtcctcgctgtcagactgtcctgtctccctgcgagtcccagccatgccagcatggaggccagtgccgtcctagcccgggtcctgggggtgggctgaccttcacctgtcactgtgcccagccgttctggggtccgcgttgcgagcgggtggcgcgctcctgccgggagctgcagtgcccggtgggcgtcccatgccagcagacgccccgcgggccgcgctgcgcctgccccccagggttgtcgggaccctcctgccgcagcttcccggggtcgccgccgggggccagcaacgccagctgcgcggccgccccctgtctccacgggggctcctgccgccccgcgccgctcgcgcccttcttccgctgcgcttgcgcgcagggctggaccgggccgcgctgcgaggcgcccgccgcggcacccgaggtctcggaggagccgcggtgcccgcgcgccgcctgccaggccaagcgcggggaccagcgctgcgaccgcgagtgcaacagcccaggctgcggctgggacggcggcgactgctcgctgagcgtgggcgacccctggcggcaatgcgaggcgctgcagtgctggcgcctcttcaacaacagccgctgcgaccccgcctgcagctcgcccgcctgcctctacgacaacttcgactgccacgccggtggccgcgagcgcacttgcaacccggtgtacgagaagtactgcgccgaccactttgccgacggccgctgcgaccagggctgcaacacggaggagtgcggctgggatgggctggattgtgccagcgaggtgccggccctgctggcccgcggcgtgctggtgctcacagtgctgctgccgccggaggagctactgcgttccagcgccgactttctgcagcggctcagcgccatcctgcgcacctcgctgcgcttccgcctggacgcgcacggccaggccatggtcttcccttaccaccggcctagtcctggctccgaaccccgggcccgtcgggagctggcccccgaggtgatcggctcggtagtaatgctggagattgacaaccggctctgcctgcagtcgcctgagaatgatcactgcttccccgatgcccagagcgccgctgactacctgggagcgttgtcagcggtggagcgcctggacttcccgtacccactgcgggacgtgcggggggagccgctggagcctccagaacccagcgtcccgctgctgccactgctagtggcgggcgctgtcttgctgctggtcattctcgtcctgggtgtcatggtggcccggcgcaagcgcgagcacagcaccctctggttccctgagggcttctcactgcacaaggacgtggcctctggtcacaagggccggcgggaacccgtgggccaggacgcgctgggcatgaagaacatggccaagggtgagagcctgatgggggaggtggccacagactggatggacacagagtgcccagaggccaagcggctaaaggtagaggagccaggcatgggggctgaggaggctgtggattgccgtcagtggactcaacaccatctggttgctgctgacatccgcgtggcaccagccatggcactgacaccaccacagggcgacgcagatgctgatggcatggatgtcaatgtgcgtggcccagatggcttcaccccgctaatgctggcttccttctgtgggggggctctggagccaatgccaactgaagaggatgaggcagatgacacatcagctagcatcatctccgacctgatctgccagggggctcagcttggggcacggactgaccgtactggcgagactgctttgcacctggctgcccgttatgcccgtgctgatgcagccaagcggctgctggatgctggggcagacaccaatgcccaggaccactcaggccgcactcccctgcacacagctgtcacagccgatgcccagggtgtcttccagattctcatccgaaaccgctctacagacttggatgcccgcatggcagatggctcaacggcactgatcctggcggcccgcctggcagtagagggcatggtggaagagctcatcgccagccatgctgatgtcaatgctgtggatgagcttgggaaatcagccttacactgggctgcggctgtgaacaacgtggaagccactttggccctgctcaaaaatggagccaataaggacatgcaggatagcaaggaggagacccccctattcctggccgcccgcgagggcagctatgaggctgccaagctgctgttggaccactttgccaaccgtgagatcaccgaccacctggacaggctgccgcgggacgtagcccaggagagactgcaccaggacatcgtgcgcttgctggatcaacccagtgggccccgcagcccccccggtccccacggcctggggcctctgctctgtcctccaggggccttcctccctggcctcaaagcggcacagtcggggtccaagaagagcaggaggccccccgggaaggcggggctggggccgcaggggccccgggggcggggcaagaagctgacgctggcctgcccgggccccctggctgacagctcggtcacgctgtcgcccgtggactcgctggactccccgcggcctttcggtgggccccctgcttcccctggtggcttcccccttgaggggccctatgcagctgccactgccactgcagtgtctctggcacagcttggtggcccaggccgggcaggtctagggcgccagccccctggaggatgtgtactcagcctgggcctgctgaaccctgtggctgtgcccctcgattgggcccggctgcccccacctgcccctccaggcccctcgttcctgctgccactggcgccgggaccccagctgctcaacccagggacccccgtctccccgcaggagcggcccccgccttacctggcagtcccaggacatggcgaggagtacccggtggctggggcacacagcagccccccaaaggcccgcttcctgcgggttcccagtgagcacccttacctgaccccatcccccgaatcccctgagcactgggccagcccctcacctccctccctctcagactggtccgaatccacgcctagcccagccactgccactggggccatggccaccaccactggggcactgcctgcccagccacttcccttgtctgttcccagctcccttgctcaggcccagacccagctggggccccagccggaagttacccccaagaggcaagtgttggcctgagacgctcgtcagttcttagatcttgggggcctaaagagacccccgtcctgcctcctttctttctctgtctcttccttccttttagtctttttcatcctcttctctttccaccaaccctcctgcatccttgccttgcagcgtgaccgagataggtcatcagcccagggcttcagtcttcctttatttataatgggtgggggctaccacccaccctctcagtcttgtgaagagtctgggacctccttcttccccacttctctcttccctcattcctttctctctccttctggcctctcatttccttacactctgacatgaatgaattattattatttttctttttctttttttttttacattttgtatagaaacaaattcatttaaacaaacttattattattattttttacaaaatatatatatggagatgctccctccccctgtgaaccccccagtgcccccgtggggctgagtctgtgggcccattcggccaagctggattctgtgtacctagtacacaggcatgactgggatcccgtgtaccgagtacacgacccaggtatgtaccaagtaggcacccttgggcgcacccactggggccaggggtcgggggagtgttgggagcctcctccccaccccacctccctcacttcactgcattccagattggacatgttccatagccttgctggggaagggcccactgccaactccctctgccccagccccacccttggccatctccctttgggaactagggggctgctggtgggaaatgggagccagggcagatgtatgcattcctttatgtccctgtaaatgtgggactacaagaagaggagctgcctgagtggtactttctcttcctggtaatcctctggcccagccttatggcagaatagaggtatttttaggctatttttgtaatatggcttctggtcaaaatccctgtgtagctgaattcccaagccctgcattgtacagccccccactcccctcaccacctaataaaggaatagttaacactcaaaaaaaaaaaaaaaaaaa

SEQ ID NO: 87 - DNA, 2153 bp, Homo sapiens
ctcctccaactgggaatgctaaaacgggactgatggacgtgtccgaactctgcatcccggaccccctcggctaccacaaccagtaggttgctgaaccgaatgtcgtccgaagacaggcacctgggctctagctgcggctccttcatcaagacggagccatctagcccatcctcgggcattgatgccctcagccaccacagccccagcggctcgtcggacgccagcggtggctttggcatggccctgggcacccacgccaacggtctggactctccgcctatgttcgcaggtgcggggctgggaggcaacccgtgtcgcaagagctacgaggactgtactagcggtatcatggaggactcggccatcaagtgcgagtacatgcttaacgccatccccaagcgcctgtgcctcgtgtgcggggacattgcttctggctaccactatggagtggcctcctgcgaggcttgcaaggcgttcttcaagagaaccattcaaggaaacatcgaatacagctgccctgccaccaacgagtgtgagatcaccaaacggaggcgcaagtcctgtcaggcctgccggttcatgaaatgcctcaaagtggggatgctgaaggaaggcgtgcgccttgaccgggtgcgaggaggccgccagaagtacaagagacggctggattcggagaacagcccctacctgagcttacagatttccccgcctgctaaaaagccattgactaagattgtctcgtatctactggtggccgagccggacaagctgtacgctatgcctcccgacgatgtgcctgaaggggatatcaaggccctgaccactctctgtgacttggcagatcgggagcttgtgttcctcattagctgggccaagcacatcccaggtttctccaacctgacactcggggaccagatgagcctgctgcagagtgcctggatggagatcctcatcctgggcatcgtgtaccgctcgcttccctatgatgacaagctggcatacgcggaggactatatcatggatgaggaacactctcgcctggtggggctgctggagctttaccgagccatcttgcagctcgtacgcaggtacaagaagctcaaggtggagaaggaagagtttgtgatgctcaaagccctggcccttgccaactcagattcaatgtacatcgagaacctggaggctgtgcagaagcttcaggacctgctgcatgaggcgctgcaggactatgagctgagccagcgccatgaggagccacggagggcgggcaagctgctgttgacactgcccctgctgcggcagacggcagccaaagccgtccagcacttctacagtgtgaaactgcagggcaaggtgcccatgcacaaactcttcctggagatgctggaggccaaggtgtgatggccccgcatgcagacggatggacacgatccacatggagacttccacggccaccagcctcgactttctcacacctgcatcggggctctgagctgtcccagaagaaggggtttcttgcttcctggccatgtgcagactcctggggggcagcagatggggagatggggatgggagggtgggggcggggggctcatctgtcacccgaattttctttggtatttttttttttccttctccatgggcagtgctaaggcttgggccggggctgacttcccttagggctggagaccacgggaggaagcatcccttcctgcaagggatccatttctggaccactccatatttaggacctggaggtacctggatgggcagggcttagtgcccagggcccaagagacttagattgggtgctcctgaaggtgttggtatcacagagggcaggcccttggaacaggaggtctctgtggcctctcctggggctctgtgcctcctcagtctagctgtctccctccccttccccctttcttgtcctagtacatccagctctcagtggatgctcctgctagagtagccacatccccaccactaagaggcccctcccctgcttcctgcccctacctcagccagctgaggtaactccaggacatgcacctgggaactcgctggctcagaaaagagttgggtcctatacccacccttgcctgttgtttctcctaatcctcttgggcatggcgagtctagaaacctatgga

SEQ ID NO: 88 - DNA, 3590 bp, Homo sapiens
cgcggacccggccggcccaggcccgcgcccgccgcggccctgagaggccccggcaggtcccggcccggcggcggcagccatggccggggggccgggcccgggggagcccgcagcccccggcgcccagcacttcttgtacgaggtgccgccctgggtcatgtgccgcttctacaaagtgatggacgccctggagcccgccgactggtgccagttcgccgccctgatcgtgcgcgaccagaccgagctgcggctgtgcgagcgctccgggcagcgcacggccagcgtcctgtggccctggatcaaccgcaacgcccgtgtggccgacctcgtgcacatcctcacgcacctgcagctgctccgtgcgcgggacatcatcacagcctggcaccctcccgccccgcttccgtccccaggcaccactgccccgaggcccagcagcatccctgcacccgccgaggccgaggcctggagcccccggaagttgccatcctcagcctccaccttcctctccccagcttttccaggctcccagacccattcagggcctgagctcggcctggttccaagccctgcttccctgtggcctccaccgccatctccagccccttcttctaccaagccaggcccagagagctcagtgtccctcctgcagggagcccgcccctctccgttttgctggcccctctgtgagatttcccggggcacccacaacttctcggaggagctcaagatcggggagggtggctttgggtgcgtgtaccgggcggtgatgaggaacacggtgtatgctgtgaagaggctgaaggagaacgctgacctggagtggactgcagtgaagcagagcttcctgaccgaggtggagcagctgtccaggtttcgtcacccaaacattgtggactttgctggctactgtgctcagaacggcttctactgcctggtgtacggcttcctgcccaacggctccctggaggaccgtctccactgccagacccaggcctgcccacctctctcctggcctcagcgactggacatccttctgggtacagcccgggcaattcagtttctacatcaggacagccccagcctcatccatggagacatcaagagttccaacgtccttctggatgagaggctgacacccaagctgggagactttggcctggcccggttcagccgctttgccgggtccagccccagccagagcagcatggtggcccggacacagacagtgcggggcaccctggcctacctgcccgaggagtacatcaagacgggaaggctggctgtggacacggacaccttcagctttggggtggtagtgctagagaccttggctggtcagagggctgtgaagacgcacggtgccaggaccaagtatctgaaagacctggtggaagaggaggctgaggaggctggagtggctttgagaagcacccagagcacactgcaagcaggtctggctgcagatgcctgggctgctcccatcgccatgcagatctacaagaagcacctggaccccaggcccgggccctgcccacctgagctgggcctgggcctgggccagctggcctgctgctgcctgcaccgccgggccaaaaggaggcctcctatgacccaggtgtacgagaggctagagaagctgcaggcagtggtggcgggggtgcccgggcatttggaggccgccagctgcatccccccttccccgcaggagaactcctacgtgtccagcactggcagagcccacagtggggctgctccatggcagcccctggcagcgccatcaggagccagtgcccaggcagcagagcagctgcagagaggccccaaccagcccgtggagagtgacgagagcctaggcggcctctctgctgccctgcgctcctggcacttgactccaagctgccctctggacccagcacccctcagggaggccggctgtcctcagggggacacggcaggagaatcgagctgggggagtggcccaggatcccggcccacagccgtggaaggactggcccttggcagctctgcatcatcgtcgtcagagccaccgcagattatcatcaaccctgcccgacagaagatggtccagaagctggccctgtacgaggatggggccctggacagcctgcagctgctgtcgtccagctccctcccaggcttgggcctggaacaggacaggcaggggcccgaagaaagtgatgaatttcagagctgatgtgttcacctgggcagatcccccaaatccggaagtcaaagttctcatggtcagaagttctcatggtgcacgagtcctcagcactctgccggcagtgggggtgggggcccatgcccgcgggggagagaaggaggtggccctgctgttctaggctctgtgggcataggcaggcagagtggaaccctgcctccatgccagcatctgggggcaaggaaggctggcatcatccagtgaggaggctggcgcatgttgggaggctgctggctgcacagacccgtgaggggaggagaggggctgctgtgcaggggtgtggagtagggagctggctcccctgagagccatgcagggcgtctgcagcccaggcctctggcagcagctctttgcccatctctttggacagtggccaccctgcacaatggggccgacgaggcctagggccctcctacctgcttacaatttggaaaagtgtggccgggtgcggtggctcacgcctgtaatcccagcactttgggaggccaaggcaggaggatcgctggagcccagtaggtcaagaccagccagggcaacatgatgagaccctgtctctgccaaaaaattttttaaactattagcctggcgtggtagcgcacgcctgtggtcccagctgctggggaggctgaagtaggaggatcatttatgcttgggaggtcgaggctgcagtgagtcatgattgtatgactgcactccagcctgggtgacagagcaagaccctgtttcaaaaagaaaaaccctgggaaaagtgaagtatggctgtaagtctcatggttcagtcctagcaagaagcgagaattctgagatcctccagaaagtcgagcagcacccacctccaacctcgggccagtgtcttcaggctttactggggacctgcgagctggcctaatgtggtggcctgcaagccaggccatccctgggcgccacagacgagctccgagccaggtcaggcttcggaggccacaagctcagcctcaggcccaggcactgattgtggcagaggggccactacccaaggtctagctaggcccaagacctagttacccagacagtgagaagcccctggaaggcagaaaagttgggagcatggcagacagggaagggaaacattttcagggaaaagacatgtatcacatgtcttcagaagcaagtcaggtttcatgtaaccgagtgtcctcttgcgtgtccaaaagtagcccagggctgtagcacaggcttcacagtgattttgtgttcagccgtgagtcacactacatgcccccgtgaagctgggcattggtgacgtccaggttgtccttgagtaataaaaacgtatgttccctaaaaaaaaaaaaaggaattc

SEQ ID NO: 89 - DNA, 488 bp, Homo sapiens
  modified_base (455): a, t, c, g, other or unknown
  modified_base (464): a, t, c, g, other or unknown
  modified_base (480): a, t, c, g, other or unknown
  modified_base (486): a, t, c, g, other or unknown
tttttttttgtgtgcaagtgtttatttggaatcccttctattttattagaaacagaaacagtaatttcaccagtaggaattgcgtgtgctctcaatacaagtaagtttgccactccttcaattgttgtccattgcagacactttggattcaaggttaagaatccaaatgagaaataagaaatatccggtccctgatgattcgtttaagtcctgttcaactcgatggaaagcttccacccgaaggaaggagttactgttcctcctgggctgggctttgtgtttctttcagtgctctaaaggaactttgtatttggggcagctgtgctctggtcatgtcagggctggctgggacagggagtttggatggcttacgggcggccgctggaccgggggctggctttttacttgaaggcttcactgggggtgttccattcaattcacaaagtggggcgttntgcaggccngtggaagggttttgcngggggntt

SEQ ID NO: 90 - DNA, 2609 bp, Homo sapiens
ggctctctacctctcgccgcccctagggaggacaccatgggcccactgatggttcttttttgcctgctgttcctgtacccaggtctggcagactcggctccctcctgccctcagaacgtgaatatctcgggtggcaccttcaccctcagccatggctgggctcctgggagccttctcacctactcctgcccccagggcctgtacccatccccagcatcacggctgtgcaagagcagcggacagtggcagaccccaggagccacccggtctctgtctaaggcggtctgcaaacctgtgcgctgtccagcccctgtctcctttgagaatggcatttataccccacggctggggtcctatcccgtgggtggcaatgtgagcttcgagtgtgaggatggcttcatattgcggggctcgcctgtgcgtcagtgtcgccccaacggcatgtgggatggagaaacagctgtgtgtgataatggggctggccactgccccaacccaggcatttcactgggcgcagtgcggacaggcttccgctttggtcatggggacaaggtccgctatcgctgctcctcgaatcttgtgctcacggggtcttcggagcgggagtgccagggcaacggggtctggagtggaacggagcccatctgccgccaaccctactcttatgacttccctgaggacgtggcccctgccctgggcacttccttctcccacatgcttggggccaccaatcccacccagaagacaaaggaaagcctgggccgtaaaatccaaatccagcgctctggtcatctgaacctctacctgctcctggactgttcgcagagtgtgtcggaaaatgactttctcatcttcaaggagagcgcctccctcatggtggacaggatcttcagctttgagatcaatgtgagcgttgccattatcacctttgcctcagagcccaaagtcctcatgtctgtcctgaacgacaactcccgggatatgactgaggtgatcagcagcctggaaaatgccaactataaagatcatgaaaatggaactgggactaacacctatgcggccttaaacagtgtctatctcatgatgaacaaccaaatgcgactcctcggcatggaaacgatggcctggcaggaaatccgacatgccatcatccttctgacagatggaaagtccaatatgggtggctctcccaagacagctgttgaccatatcagagagatcctgaacatcaaccagaagaggaatgactatctggacatctatgccatcggggtgggcaagctggatgtggactggagagaactgaatgagctagggtccaagaaggatggtgagaggcatgccttcattctgcaggacacaaaggctctgcaccaggtctttgaacatatgctggatgtctccaagctcacagacaccatctgcggggtggggaacatgtcagcaaacgcctctgaccaggagaggacaccctggcatgtcactattaagcccaagagccaagagacctgccggggggccctcatctccgaccaatgggtcctgacagcagctcattgcttccgcgatggcaacgaccactccctgtggagggtcaatgtgggagaccccaaatcccagtggggcaaagaattgcttattgagaaggcggtgatctccccagggtttgatgtctttgccaaaaagaaccagggaatcctggagttctatggtgatgacatagctctgctgaagctggcccagaaagtaaagatgtccacccatgccaggcccatctgccttccctgcacgatggaggccaatctggctctgcggagacctcaaggcagcacctgtagggaccatgagaatgaactgctgaacaaacagagtgttcctgctcattttgtcgccttgaatgggagcaaactgaacattaaccttaagatgggagtggagtggacaagctgtgccgaggttgtctcccaagaaaaaaccatgttccccaacttgacagatgtcagggaggtggtgacagaccagttcctatgcagtgggacccaggaggatgagagtccctgcaagggagaatctgggggagcagttttccttgagcggagattcaggttttttcaggtgggtctggtgagctggggtctttacaacccctgccttggctctgctgacaaaaactcccgcaaaagggcccctcgtagcaaggtcccgccgccacgagactttcacatcaatctcttccgcatgcagccctggctgaggcagcacctgggggatgtcctgaattttttacccctctagccatggccactgagccctctgctgccctgccagaatctgccgcccctccatcttctacctctgaatggccacccttagaccctgtgatccatcctctctcctagctgagtaaatccgggtctctaggatgccagaggcagcgcacacaagctgggaaatcctcagggctcctaccagcaggactgcctcgctgccccacctcccgctccttggcctgtccccagattccttccctggttgacttgactcatgcttgtttcactttcacatggaatttcccagttatgaaattaataaaaatcaatggtttccac

SEQ ID NO: 91 - DNA, 434 bp, Homo sapiens
gccaaacagtcactttgtttaagcaaacacaagtacaaagtaaaatagaaccacaaaataatgaactgcatgttcataacatacaaaaatcgccgcctactcagtaggtaactacaacattccaactcctgaatatatttataaatttacattttcagttaaaagaatagacttttgagagttcagattttgttttagattttgttttcttacattctggagaaccgaagctcagctcagccctcttccttattttgctcccaaagcctcccccaaatcatcactccctgccccccttaaggctagaggtgagcatgtccctcacaattgcacatgtcaagccatcagcaaggcgcatcacacaaaaggcaccaagacgtgaaactttttaaaccaaaaggacgaagaaaaaacactttcaaaaaaaaaaaaaa

SEQ ID NO: 92 - DNA, 142 bp, Homo sapiens
  modified_base (2): a, t, c, g, other or unknown
  modified_base (5): a, t, c, g, other or unknown
  modified_base (18): a, t, c, g, other or unknown
  modified_base (28): a, t, c, g, other or unknown
  modified_base (35): a, t, c, g, other or unknown
  modified_base (37): a, t, c, g, other or unknown
  modified_base (47): a, t, c, g, other or unknown
  modified_base (57): a, t, c, g, other or unknown
  modified_base (67): a, t, c, g, other or unknown
  modified_base (75): a, t, c, g, other or unknown
  modified_base (82): a, t, c, g, other or unknown
  modified_base (95): a, t, c, g, other or unknown
  modified_base (100): a, t, c, g, other or unknown
  modified_base (125): a, t, c, g, other or unknown
  modified_base (128): a, t, c, g, other or unknown
  modified_base (131): a, t, c, g, other or unknown
  modified_base (137): a, t, c, g, other or unknown
tnggncaatcaaaatganggggttcttngaataantnaacatcagantgtgtttatnttcagatagnctgggccnctccttngaaatgcaatggngaccnttgtgactgggggtgaatgcacacnttngtncttccntacag

SEQ ID NO: 93 - DNA, 4604 bp, Homo sapiens
ggaacagcttgtccacccgccggccggaccagaagcctttgggtctgaagtgtctgtgagacctcacagaagagcacccctgggctccacttacctgccccctgctccttcagggatggaggcaatggcggccagcacttccctgcctgaccctggagactttgaccggaacgtgccccggatctgtggggtgtgtggagaccgagccactggctttcacttcaatgctatgacctgtgaaggctgcaaaggcttcttcaggcgaagcatgaagcggaaggcactattcacctgccccttcaacggggactgccgcatcaccaaggacaaccgacgccactgccaggcctgccggctcaaacgctgtgtggacatcggcatgatgaaggagttcattctgacagatgaggaagtgcagaggaagcgggagatgatcctgaagcggaaggaggaggaggccttgaaggacagtctgcggcccaagctgtctgaggagcagcagcgcatcattgccatactgctggacgcccaccataagacctacgaccccacctactccgacttctgccagttccggcctccagttcgtgtgaatgatggtggagggagccatccttccaggcccaactccagacacactcccagcttctctggggactcctcctcctcctgctcagatcactgtatcacctcttcagacatgatggactcgtccagcttctccaatctggatctgagtgaagaagattcagatgacccttctgtgaccctagagctgtcccagctctccatgctgccccacctggctgacctggtcagttacagcatccaaaaggtcattggctttgctaagatgataccaggattcagagacctcacctctgaggaccagatcgtactgctgaagtcaagtgccattgaggtcatcatgttgcgctccaatgagtccttcaccatggacgacatgtcctggacctgtggcaaccaagactacaagtaccgcgtcagtgacgtgaccaaagccggacacagcctggagctgattgagcccctcatcaagttccaggtgggactgaagaagctgaacttgcatgaggaggagcatgtcctgctcatggccatctgcatcgtctccccagatcgtcctggggtgcaggacgccgcgctgattgaggccatccaggaccgcctgtccaacacactgcagacgtacatccgctgccgccacccgcccccgggcagccacctgctctatgccaagatgatccagaagctagccgacctgcgcagcctcaatgaggagcactccaagcagtaccgctgcctctccttccagcctgagtgcagcatgaagctaacgccccttgtgctcgaagtgtttggcaatgagatctcctgactaggacagcctgtgcggtgcctgggtggggctgctcctccagggccacgtgccaggcccggggctggcggctactcagcagccctcctcacccgtctggggttcagcccctcctctgccacctcccctatccacccagcccattctctctcctgtccaacctaacccctttcctgcgggcttttccccggtcccttgagacctcagccatgaggagttgctgtttgtttgacaaagaaacccaagtgggggcagagggcagaggctggaggcaggccttgcccagagatgcctccaccgctgcctaagtggctgctgactgatgttgagggaacagacaggagaaatgcatccattcctcagggacagagacacctgcacctccccccactgcaggccccgcttgtccagcgcctagtggggtctccctctcctgccttactcacgataaataatcggcccacagctcccaccccacccccttcagtgcccaccaacatcccattgccctggttatattctcacgggcagtagctgtggtgaggtgggttttcttcccatcactggagcaccaggcacgaacccacctgctgagagacccaaggaggaaaaacagacaaaaacagcctcacagaagaatatgacagctgtccctgtcaccaagctcacagttcctcgccctgggtctaaggggttggttgaggtggaagccctccttccacggatccatgtagcaggactgaattgtccccagtttgcagaaaagcacctgccgacctcgtcctccccctgccagtgccttacctcctgcccaggagagccagccctccctgtcctcctcggatcaccgagagtagccgagagcctgctcccccaccccctccccaggggagagggtctggagaagcagtgagccgcatcttctccatctggcagggtgggatggaggagaagaattttcagaccccagcggctgagtcatgatctccctgccgcctcaatgtggttgcaaggccgctgttcaccacagggctaagagctaggctgccgcaccccagagtgtgggaagggagagcggggcagtctcgggtggctagtcagagagagtgtttgggggttccgtgatgtagggtaaggtgccttcttattctcactccaccacccaaaagtcaaaaggtgcctgtgaggcaggggcggagtgatacaacttcaagtgcatgctctctgcaggtcgagcccagcccagctggtgggaagcgtctgtccgtttactccaaggtgggtctttgtgagagtgagctgtaggtgtgcgggaccggtacagaaaggcgttcttcgaggtggatcacagaggcttcttcagatcaatgcttgagtttggaatcggccgcattccctgagtcaccaggaatgttaaagtcagtgggaacgtgactgccccaactcctggaagctgtgtccttgcacctgcatccgtagttccctgaaaacccagagaggaatcagacttcacactgcaagagccttggtgtccacctggccccatgtctctcagaattcttcaggtggaaaaacatctgaaagccacgttccttactgcagaatagcatatatatcgcttaatcttaaatttattagatatgagttgttttcagactcagactccatttgtattatagtctaatatacagggtagcaggtaccactgatttggagatatttatggggggagaacttacattgtgaaacttctgtacattaattattattgctgttgttattttacaagggtctagggagagacccttgtttgattttagctgcagaactgtattggtccagcttgctcttcagtgggagaaaaacacttgtaagttgctaaacgagtcaatcccctcattcaggaaaactgacagaggagggcgtgactcacccaagccatatataactagctagaagtgggccaggacaggccgggcgcggtggctcacgcctgtaatcccagcagtttgggaggtcgaggtaggtggatcacctgaggtcgggagttcgagaccaacctgaccaacatggagaaaccctgtctctattaaaaatacaaaaaaaaaaaaaaaaaaaaatagccgggcatggtggcgcaagcctgtaatcccagctactcaggaggctgaggcagaagaattgaacccaggaggtggaggttgcagtgagctgagatcgtgccgttactctccaacctggacaacaagagcgaaactccgtcttagaagtggaccaggacaggaccagattttggagtcatggtccggtgtccttttcactacaccatgtttgagctcagacccccactctcattccccaggtggctgacccagtccctgggggaagccctggatttcagaaagagccaagtctggatctgggaccctttccttccttccctggcttgtaactccaccaagcccatcagaaggagaaggaaggagactcacctctgcctcaatgtgaatcagaccctaccccaccacgatgtgccctggctgctgggctctccacctcaggccttggataatgctgttgcctcatctataacatgcatttgtctttgtaatgtcaccaccttcccagctctccctctggccctgcttcttcggggaactcctgaaatatcagttactcagccctgggccccaccacctaggccactcctccaaaggaagtctaggagctgggaggaaaagaaaagaggggaaaatgagtttttatggggctgaacggggagaaaaggtcatcatcgattctactttagaatgagagtgtgaaatagacatttgtaaatgtaaaacttttaaggtatatcattataactgaaggagaaggtgccccaaaatgcaagattttccacaagattcccagagacaggaaaatcctctggctggctaactggaagcatgtaggagaatccaagcgaggtcaacagagaaggcaggaatgtgtggcagatttagtgaaagctagagatatggcagcgaaaggatgtaaacagtgcctgctgaatgatttccaaagagaaaaaaagtttgccagaagtttgtcaagtcaaccaatgtagaaagctttgcttatggtaataaaaatggctcatacttatatagcacttactttgtttgcaagtactgctgtaaataaatgctttatgcaaacc

SEQ ID NO: 94 - DNA, 455 bp, Homo sapiens
  modified_base (3): a, t, c, g, other or unknown
  modified_base (401): a, t, c, g, other or unknown
gangctcaaacatttatctggactggaaatgattcgagatttgtgtgatgggcaactggagggggcagaaattggctcaacagaaataacctttacaccagagaagatcaaaggtggaatccacacagcagataccaagacagcagggagtgtgtgcctcttgatgcaggtctcaatgccgtgtgttctctttgctgcttctccatcagaacttcatttgaaaggtggaactaatgctgaaatggcaccacagatcgattatacagtgatggtcttcaagccaattgttgaaaaatttggtttcatatttaattgtgacattaaaacaaggggatattacccaaaagggggtggtgaagtgattgttcgaatgtcaccagttaaacaattgaaccctatanatttaactgagcgtggctgtgtgactaagatatatggaagagctttcgttgctg

SEQ ID NO: 95 - DNA, 5532 bp, Homo sapiens
gccgcgctgcgccggagtcccgagctagccccggcgccgccgccgcccagaccggacgacaggccacctcgtcggcgtccgcccgagtccccgcctcgccgccaacgccacaaccaccgcgcacggccccctgactccgtccagtattgatcgggagagccggagcgagctcttcggggagcagcgatgcgaccctccgggacggccggggcagcgctcctggcgctgctggctgcgctctgcccggcgagtcgggctctggaggaaaagaaagtttgccaaggcacgagtaacaagctcacgcagttgggcacttttgaagatcattttctcagcctccagaggatgttcaataactgtgaggtggtccttgggaatttggaaattacctatgtgcagaggaattatgatctttccttcttaaagaccatccaggaggtggctggttatgtcctcattgccctcaacacagtggagcgaattcctttggaaaacctgcagatcatcagaggaaatatgtactacgaaaattcctatgccttagcagtcttatctaactatgatgcaaataaaaccggactgaaggagctgcccatgagaaatttacaggaaatcctgcatggcgccgtgcggttcagcaacaaccctgccctgtgcaacgtggagagcatccagtggcgggacatagtcagcagtgactttctcagcaacatgtcgatggacttccagaaccacctgggcagctgccaaaagtgtgatccaagctgtcccaatgggagctgctggggtgcaggagaggagaactgccagaaactgaccaaaatcatctgtgcccagcagtgctccgggcgctgccgtggcaagtcccccagtgactgctgccacaaccagtgtgctgcaggctgcacaggcccccgggagagcgactgcctggtctgccgcaaattccgagacgaagccacgtgcaaggacacctgccccccactcatgctctacaaccccaccacgtaccagatggatgtgaaccccgagggcaaatacagctttggtgccacctgcgtgaagaagtgtccccgtaattatgtggtgacagatcacggctcgtgcgtccgagcctgtggggccgacagctatgagatggaggaagacggcgtccgcaagtgtaagaagtgcgaagggccttgccgcaaagtgtgtaacggaataggtattggtgaatttaaagactcactctccataaatgctacgaatattaaacacttcaaaaactgcacctccatcagtggcgatctccacatcctgccggtggcatttaggggtgactccttcacacatactcctcctctggatccacaggaactggatattctgaaaaccgtaaaggaaatcacagggtttttgctgattcaggcttggcctgaaaacaggacggacctccatgcctttgagaacctagaaatcatacgcggcaggaccaagcaacatggtcagttttctcttgcagtcgtcagcctgaacataacatccttgggattacgctccctcaaggagataagtgatggagatgtgataatttcaggaaacaaaaatttgtgctatgcaaatacaataaactggaaaaaactgtttgggacctccggtcagaaaaccaaaattataagcaacagaggtgaaaacagctgcaaggccacaggccaggtctgccatgccttgtgctcccccgagggctgctggggcccggagcccagggactgcgtctcttgccggaatgtcagccgaggcagggaatgcgtggacaagtgcaagcttctggagggtgagccaagggagtttgtggagaactctgagtgcatacagtgccacccagagtgcctgcctcaggccatgaacatcacctgcacaggacggggaccagacaactgtatccagtgtgcccactacattgacggcccccactgcgtcaagacctgcccggcaggagtcatgggagaaaacaacaccctggtctggaagtacgcagacgccggccatgtgtgccacctgtgccatccaaactgcacctacggatgcactgggccaggtcttgaaggctgtccaacgaatgggcctaagatcccgtccatcgccactgggatggtgggggccctcctcttgctgctggtggtggccctggggatcggcctcttcatgcgaaggcgccacatcgttcggaagcgcacgctgcggaggctgctgcaggagagggagcttgtggagcctcttacacccagtggagaagctcccaaccaagctctcttgaggatcttgaaggaaactgaattcaaaaagatcaaagtgctgggctccggtgcgttcggcacggtgtataagggactctggatcccagaaggtgagaaagttaaaattcccgtcgctatcaaggaattaagagaagcaacatctccgaaagccaacaaggaaatcctcgatgaagcctacgtgatggccagcgtggacaacccccacgtgtgccgcctgctgggcatctgcctcacctccaccgtgcaactcatcacgcagctcatgcccttcggctgcctcctggactatgtccgggaacacaaagacaatattggctcccagtacctgctcaactggtgtgtgcagatcgcaaagggcatgaactacttggaggaccgtcgcttggtgcaccgcgacctggcagccaggaacgtactggtgaaaacaccgcagcatgtcaagatcacagattttgggctggccaaactgctgggtgcggaagagaaagaataccatgcagaaggaggcaaagtgcctatcaagtggatggcattggaatcaattttacacagaatctatacccaccagagtgatgtctggagctacggggtgaccgtttgggagttgatgacctttggatccaagccatatgacggaatccctgccagcgagatctcctccatcctggagaaaggagaacgcctccctcagccacccatatgtaccatcgatgtctacatgatcatggtcaagtgctggatgatagacgcagatagtcgcccaaagttccgtgagttgatcatcgaattctccaaaatggcccgagacccccagcgctaccttgtcattcagggggatgaaagaatgcatttgccaagtcctacagactccaacttctaccgtgccctgatggatgaagaagacatggacgacgtggtggatgccgacgagtacctcatcccacagcagggcttcttcagcagcccctccacgtcacggactcccctcctgagctctctgagtgcaaccagcaacaattccaccgtggcttgcattgatagaaatgggctgcaaagctgtcccatcaaggaagacagcttcttgcagcgatacagctcagaccccacaggcgccttgactgaggacagcatagacgacaccttcctcccagtgcctgaatacataaaccagtccgttcccaaaaggcccgctggctctgtgcagaatcctgtctatcacaatcagcctctgaaccccgcgcccagcagagacccacactaccaggacccccacagcactgcagtgggcaaccccgagtatctcaacactgtccagcccacctgtgtcaacagcacattcgacagccctgcccactgggcccagaaaggcagccaccaaattagcctggacaaccctgactaccagcaggacttctttcccaaggaagccaagccaaatggcatctttaagggctccacagctgaaaatgcagaatacctaagggtcgcgccacaaagcagtgaatttattggagcatgaccacggaggatagtatgagccctaaaaatccagactctttcgatacccaggaccaagccacagcaggtcctccatcccaacagccatgcccgcattagctcttagacccacagactggttttgcaacgtttacaccgactagccaggaagtacttccacctcgggcacattttgggaagttgcattcctttgtcttcaaactgtgaagcatttacagaaacgcatccagcaagaatattgtccctttgagcagaaatttatctttcaaagaggtatatttgaaaaaaaaaaaaaaagtatatgtgaggatttttattgattggggatcttggagtttttcattgtcgctattgatttttacttcaatgggctcttccaacaaggaagaagcttgctggtagcacttgctaccctgagttcatccaggcccaactgtgagcaaggagcacaagccacaagtcttccagaggatgcttgattccagtggttctgcttcaaggcttccactgcaaaacactaaagatccaagaaggccttcatggccccagcaggccggatcggtactgtatcaagtcatggcaggtacagtaggataagccactctgtcccttcctgggcaaagaagaaacggaggggatgaattcttccttagacttacttttgtaaaaatgtccccacggtacttactccccactgatggaccagtggtttccagtcatgagcgttagactgacttgtttgtcttccattccattgttttgaaactcagtatgccgcccctgtcttgctgtcatgaaatcagcaagagaggatgacacatcaaataataactcggattccagcccacattggattcatcagcatttggaccaatagcccacagctgagaatgtggaatacctaaggataacaccgcttttgttctcgcaaaaacgtatctcctaatttgaggctcagatgaaatgcatcaggtcctttggggcatagatcagaagactacaaaaatgaagctgctctgaaatctcctttagccatcaccccaaccccccaaaattagtttgtgttacttatggaagatagttttctccttttacttcacttcaaaagctttttactcaaagagtatatgttccctccaggtcagctgcccccaaaccccctccttacgctttgtcacacaaaaagtgtctctgccttgagtcatctattcaagcacttacagctctggccacaacagggcattttacaggtgcgaatgacagtagcattatgagtagtgtgaattcaggtagtaaatatgaaactagggtttgaaattgataatgctttcacaacatttgcagatgttttagaaggaaaaaagttccttcctaaaataatttctctacaattggaagattggaagattcagctagttaggagcccattttttcctaatctgtgtgtgccctgtaacctgactggttaacagcagtcctttgtaaacagtgttttaaactctcctagtcaatatccaccccatccaatttatcaaggaagaaatggttcagaaaatattttcagcctacagttatgttcagtcacacacacatacaaaatgttccttttgcttttaaagtaatttttgactcccagatcagtcagagcccctacagcattgttaagaaagtatttgatttttgtctcaatgaaaataaaactatattcatttcc

SEQ ID NO: 96 - DNA, 2327 bp, Homo sapiens
aatgccaagtgatggcaactgcctcccgccgcgtctccagccggtgcggggaacgagaccctgcggagattaccagtacgtggggaagttggcgggcaggaattcagaatccattgaggccttcactcaccactttccctctctcgctgtgttcccaaatgtgccacttttctgttggctcacatgcacccatgctctatttgatattcagggctctgaatttcaagccagactcagtcagtgtgattgtcactgctttcctgtccttcctttatcatctgtagacttgggtcccgtttttgcaggttgatgttctgtcttcgctgggctctggactcactgctcacgagtgcggtgtctgcatgggcactgcccagacatgcactgttggtccctcgatggctgcatggtcaggcctcagggctctctgccaggccgacctacagcccatacagacctgatttctgggcctggatccaggggatgccatctgggaagtgcgggatcttcccacgatgtcactgtaaaactcaccagggaggttttagaaattgaaccggcatcattcagattccatcctgctttttggtcctgagaaaatcctgcttttccctgagtaactgggataatgggtcaccagctcccatgccctagatgaggactagttagcattttctagtgcctggagatttccagatggaagctgtacttgggtctgtgtatctttgttacaggattcaataattcatgcactgaatttcccttcccggcaactccagacaccaaatcgcttcccatggtgtcccccaatcacttaggaatttagcctgtgtctaaagaccctctctgcagcctgacgtggctagccatcccagtacttccacgtttttcatgcctttctccaacagcgttgccgtggccccttaggcggcgatcgttttatcaatggtcgctccctctttttatctgttggcaggagccctttttcaacgccctcgctggagtctggcctgcacgccttgctgaatgaagccggaacctcagccccgcttccctttgaaatgaatgttcctggggcgccctctcgtggattttggagctaatcgtctgtgaatgccaagtgatggcaactgccctcccgccgcgtctccagccggtgcgggggaacgagaccctgcgggagcattaccagtacgtggggaagttggcgggcaggctgaaggaggcctccgagggcagcacgctcaccaccgtgctcttcttggtcatctgcagcttcatcgtcttggagaacctgatggttttgattgccatctggaaaaacaataaatttcacaaccgcatgtactttttcattggcaacctggctctctgcgacctgctggccggcatcgcttacaaggtcaacattctgatgtctggcaagaagacgttcagcctgtctcccacggtctggttcctcagggagggcagtatgttcgtggcccttggggcgtccacctgcagcttactggccatcgccatcgagcggcacttgacaatgatcaaaatgaggccttacgacgccaacaagaggcaccgcgtcttcctcctgatcgggatgtgctggctcattgccttcacgctgggcgccctgcccattctgggctggaactgcctgcacaatctccctgactgctctaccatcctgcccctctactccaagaagtacattgccttctgcatcagcatcttcacggccatcctggtgaccatcgtgatcctctacgcacgcatctacttcctggtgaagtccagcagccgtaaggtggccaaccacaacaactcggagcggtccatggcactgctgcggaccgtggtgattgtggtgagcgtgttcatcgcctgctggtccccactcttcatcctcttcctcattgatgtggcctgcagggtgcaggcgtgccccatcctcttcaaggctcagtggttcatcgtgttggctgtgctcaactccgccatgaacccggtcatctacacgctggccagcaaggagatgcggcgggccttcttccgtctggtctgcaactgcctggtcaggggacggggggcccgcgcctcacccatccagcctgcgctcgacccaagcagaagtaaatcaagcagcagcaacaatagcagccactctccgaaggtcaaggaagacctgccccacacagacccctcatcctgcatcatggacaagaacgcagcacttcagaatgggatcttctgcaactgatcgtctccatgcgccctgctctgcggctgtgttcttatttattgcatgcgtcgcttccacaggggcc

SEQ ID NO: 97 - DNA, 1936 bp, Homo sapiens
ggtcctctgtggtgcacagcccaccccccagccatgcgctctctccttctgggcaccttatgcctcctggctgtggccctggcagccgaggtgaagaaacctgtagaggccgcagcccctggtactgcggagaagctgagttccaaggcgaccacactggcagagcccagcacaggcctggccttcagcctgtatcaggcaatggccaaggaccaggcagtggagaacatcctggtgtcacccgtggtggtggcctcgtcgctgggtctcgtgtcgctgggcggcaaggcgaccacggcgtcgcaggccaaggcagtgctgagcgccgagcagctgcgcgacgaggaggtgcacgccggcctgggtgagctgctgcgctcactcagcaactcgacggcgcgcaacgtgacctggaagctgggcagccgactgtacggacccagctcagtgagcttcgctgatgacttcgtgcgcagcagcaagcagcactacaactgcgagcactccaagatcaacttcccggacaagcgcagcgcgctgcagtccatcaacgagtgggccgcgcagaccaccgacggcaagctgcccgaggtcaccaaggacgtggagcgcacggacggcgccctgctagtcaacgccatgttcttcaagccacactgggatgagaaattccaccacaagatggtggacaaccgtggcttcatggtgactcggtcctatactgtgggtgttacgatgatgcaccggacaggcctctacaactactacgacgacgagaaggagaagctgcagctggtggagatgcccctggctcacaagctctccagcctcatcatcctcatgccccatcacgtggagcctctcgagcgccttgaaaagctgctaaccaaagagcagctgaagatctggatggggaagatgcagaagaaggctgttgccatctccttgcccaagggtgtggtggaggtgacccatgacctgcagaaacacctggctgggctgggcctgactgaggccattgacaagaacaaggccgacttatcacgcatgtctggcaagaaggatctgtacctggccagtgtgttccacgccaccgcctttgagttggacacagatggcaacccctttgaccaggacatctacgggcgcgaggagctgcgcagccccaagctgttctacgccgaccaccccttcatcttcctggtgcgggacacccaaagcggctccctgctattcattgggcgcctggtccggctcaagggtgacaagatgcgagacgagttatagggcctcagggtgcacacaggatggcaggaggcatccaaaggctcctgagacacatgggtgctattggggttgggggggaggtgaggtaccagccttggatactccatggaattcgagctccacttggacatgggccccagataccatgatgctgagcccggaaactccacatcctgtgggacctgggccatagtcattctgcctgccctgaaagtcccagatcaagcctgcctcaatcagtattcatatttatagccaggtaccttctcacctgtgagaccaaattgagctcggggggtcagccagccctcttctgacactaaaacacctcagctgcctccccagctctatcccaacctctcccaactataaaactaggtgctgcagcctgggaccaggcacccccagaatgacctggccgcagtgaggcgattgagaaggagctcccaggaggggcttctgggaagaccctggtcaagaagcatcgtctggcgttgtggggatgaactttttgttttgtttcttccttttttagttcttcaaggaatggggggccaggggggcaatgagcctttgttgctaatcaaatccgggacttgtttgtacgtttttttttctcactgaaaccttttccagtgccaaaaaaaaa

SEQ ID NO: 98 - DNA, 1537 bp, Homo sapiens
cactcctgcctccaccatgtccatcagggtgacccagaagtcctacaaggtgtccacctctggcccccgggccttcagcagccgctcctacacgagtgggcccggttcccgcatcagctcctcgagcttctcccgagtgggcagcagcaactttcgcggtggcctgggcggcggctatggtggggccagcggcatgggaggcatcaccgcagttacggtcaaccagagcctgctgagcccccttgtcctggaggtggaccccaacatccaggccgtgcgcacccaggagaaggagcagatcaagaccctcaacaacaagtttgcctccttcatagacaaggtacggttcctggagcagcagaacaagatgctggagaccaagtggagcctcctgcagcagcagaagacggctcgaagcaacatggacaacatgttcgagagctacatcaacaaccttaggcggcagctggagactctgggccaggagaagctgaagctggaggcggagcttggcaacatgcaggggctggtggaggacttcaagaacaagtatgaggatgagatcaataagcgtacagagatggagaacgaatttgtcctcatcaagaaggatgtggatgaagcttacatgaacaaggtagagctggagtctcgcctggaagggctgaccgacgagatcaacttcctcaggcagctgtatgaagaggagatccgggagctgcagtcccagatctcggacacatctgtggtgctgtccatggacaacagccgctccctggacatggacagcatcattgctgaggtcaaggcacagtacgaggatattgccaaccgcagccgggctgaggctgagagcatgtaccagatcaagtatgaggagctgcagagcctggctgggaagcacggggatgacctgcggcgcacaaagactgagatctctgagatgaaccggaacatcagccggctccaggctgagattgagggcctcaaaggccagagggcttccctggaggccgccattgcagatgccgagcagcgtggagagctggccattaaggatgccaacgccaagttgtccgagctggaggccgccctgcagcgggccaagcaggacatggcgcggcagctgcgtgagtaccaggagctgatgaacgtcaagctggccctggacatcgagatcgccacctacaggaagctgctggagggcgaggagagccggctggagtctgggatgcagaacatgagtattcatacgaagaccaccagcggctatgcaggtggtctgagctcggcctatgggggcctcacaagccccggcctcagctacagcctgggctccagctttggctctggcgcgggctccagctccttcagccgcaccagctcctccagggccgtggttgtgaagaagatcgagacacgtgatgggaagctggtgtctgagtcctctgacgtcctgcccaagtgaacagctgcggcagcccctcccagcctacccctcctgcgctgccccagagcctgggaaggaggccgctat

SEQ ID NO: 99 - DNA, 569 bp, Homo sapiens
tttttttttttttttttttttttgcctttgcaaagcttttatttcatgtctgcggcatggaatccacctgcacatggcatcttagctgtgaaggagaaagcagtgcacgagaaggaatgagtgggcggaaccaacggcctccacaagctgccttccagcagcctgccaagcgcatggcagagagagactgcaaacaaacacaagcaaacagagtctcttcacagctggagtctgaaagctcatagtggcatgtgtgaatctgacaaaattaaaagtgtgcatagtccattacatgcataaaacactaataataatcctgtttacacgtgactgcagcaggcaggtccagctccaccactggcctcctgccacatcacatcaagtgccatggtttagagggtttttcatatgtaattcttttattctgtaaaaggtaacaaaatatacagaacaaaactttccctttttaaaactaatgttacaaatctgtattatcacttgtatataaatagtatatagctgatcattaataaggtgtataagtacaatgtattctaaaactgttaagc

SEQ ID NO: 100 - DNA, 455 bp, Homo sapiens
gggccacaggagcgcttcgcagccgaggaaccggacgcggacaccgcgccccggagcctccagcccctcgcctgttgccgcgcgagtcccgggcccggagcgctaggagcgtcggaaggagccatgctctggacgggataaggatgccagatggctgctacgcggacgggacgtgggaactgagtgtccatgtgacggacctgaaccgcgatgtcaccctgagagtgaccggcgaggtgcacattggaggcgtgatgcttaagctggtggagaaactcgatgtaaaaaaagattggtctgaccatgctctctggtgggaaaagaagagaacttggcttctgaagacacattggaccttagataagtatggtattcaggcagatgctaagcttcagttcacccctcagcacaaactgctccgcctgcagcttcccaacatgaagtatgtgaaggtg

SEQ ID NO: 101 - DNA, 3334 bp, Homo sapiens
ctgtggcgcttcccctgcgaggatggctaccctggttgtaaacaagctcggagcgggagtagacagtggccggcagggcagccgggggacagctgtagtgaaggtgctagagtgtggagtttgtgaagatgtcttttctttgcaaggagacaaagttccccgtcttttgctttgtggccataccgtctgtcatgactgtctcactcgcctacctcttcatggaagagcaatccgttgcccatttgatcgacaagtaacagacctaggtgattcaggtgtctggggattgaaaaaaaattttgctttattggagcttttggaacgactgcagaatgggcctattggtcagtatggagctgcagaagaatccattgggatatctggagagagcatcattcgttgtgatgaagatgaagctcaccttgcctctgtatattgcactgtgtgtgcaactcatttgtgctctgagtgttctcaagttactcattctacaaagacattagcaaagcacaggcgagttcctctagctgataaacctcatgagaaaactatgtgctctcagcaccaggtgcatgccattgagtttgtttgcttggaagaaggttgtcaaactagcccactcatgtgctgtgtctgcaaagaatatggaaaacaccagggtcacaagcattcagtattggaaccagaagctaatcagatccgagcatcaattttagatatggctcactgcatacggaccttcacagaggaaatctcagattattccagaaaattagttggaattgtgcagcacattgaaggaggagaacaaatcgtggaagatggaattggaatggctcacacagaacatgtaccagggactgcagagaatgcccggtcatgtattcgagcttatttttatgatctacatgaaactctgtgtcgtcaagaagaaatggctctaagtgttgttgatgctcatgttcgtgaaaaattgatttggctcaggcagcaacaagaagatatgactattttgttgtcagaggtttctgcagcctgcctccactgtgaaaagactttgcagcaggatgattgtagagttgtcttggcaaaacaggaaattacaaggttactggaaacattgcagaaacagcagcagcagtttacagaagttgcagatcacattcagttggatgccagcatccctgtcacttttacaaaggataatcgagttcacattggaccaaaaatggaaattcgggtcgttacgttaggattggatggtgctggaaaaactactatcttgtttaagttaaaacaggatgaattcatgcagcccattccaacaattggttttaacgtggaaactgtagaatataaaaatctaaaattcactatttgggatgtaggtggaaaacacaaattaagaccattgtggaaacattattacctcaatactcaagctgttgtgtttgttgtagatagcagtcatagagacagaattagtgaagcacacagcgaacttgcaaagttgttaacggaaaaagaactccgagatgctctgctcctgatttttgctaacaaacaggatgttgctggagcactgtcagtagaagaaatcactgaactactcagtctccataaattatgctgtggccgtagctggtatattcagggctgtgatgctcgaagtggtatgggactgtatgaagggttggactggctctcacggcaacttgtagctgctggagtattggatgttgcttgattttaaaggcagcagttgtttgaagttttgtggttaaaagtaactttgcacatagtatgttttaagaaattatacatctcaaaagatggtaatttaggatgcatatatatatatatatatataaaggaatcttggattgggaattcagtactttgctttaaaaaaattttgtggcagaattaaatttctaattgagcagattagattgaattaaatagaaacttattgaatatacattcttttaaaaagtatatttgttatttaagtttttcagataatatgtgaccaatatactgggaaagaggtagtcacagagaaagggtaagtgaaggtttattctttcagtgaaaaaagaatagccaattgagtgcctaatgagacctctgtgtgaagcaagtgaagtatagctgcttcttttaacctgccttttcactgaatgttggcagcatttagtagtagaaatgacagttgcttaatgaaatagaatccaaactacatatttggataataggattactttatgtttatgttcagagttaacagaacacctttaatgctaagaactataaggtacagaaaattaatactttatatagtgttttattaactttctcctacagcattttgtataaaacacaatgagggagtgaaatgttacccaattaggcttgtcaggttagtaataaactgaacagtaataaaactgtggaagtaattggatctgaatttatgaaagacccatttccaggactgaacctaggtcagagctctaaattggtccttctatttttcaacaaatttaaagtaatatttctttctaatataatattgcatcctttgtgggaatgactataggtaaaatgtagtaagtaacgcagaaccagggttggctttatttaaaagctagtgacctaaatagaaagcgaacttcaagagaagttgtaagtacagtggcaaatgcttattacttacttcaaactgtttcccaaaataagtgcatttattttgacaataaaacttaaggctgttcatgagaaggccttgaaaagttactctagaggaaaaatgtctaaagaaaaaaaaaattcaaaaagtttacattaattattcagtgttgtgagtaaataaaaatgtgtgctctttactgtttttcatttttaaagaatattattatggaagcacgatttatttaaataggtacattgagacttttttttttaatgttctgatacattaggatgaagttaaatcttaaatcttattagttgaattgttgtaaggacagtgatgtctggtaacaagatgtgactttttggtagcactgttgtggttcattcttttcaaatctatttttgtttaaaaacaatacaagttttagaaaacaaagcattaaaaaaaaagcctatcagtattatgggcaatatgtaaataaataaatgtaatatttcatcctttatttttcaggtaaaaggtcatgctgttacaggtgtagtttgtgtgcataaataatacttccgaattaaattatttaatatttgactgatttcaataactgtgaaaataaaaaggtgttgtattgcttgtgag

SEQ ID NO: 102 - DNA, 1438 bp, Homo sapiens
gggctgcagtgagccaaaagcatgccattgcactccagcttgggcaacagagtgagaccctgtctcaaaaaaaagaaaaaataatactatgtctggtccataacctgaaatatttttatcttcacgttccttatcattcactgaacttttatttttcttttaaaattttttcctttctttttaaatttgcttctacagatttcttcattctccatttagcaaggtcatggaagatttggaggaaacattatttgaagaatttgaaaactattcctatgacctagactattactctctggagtctgatttggaggagaaagtccagctgggagttgttcactgggtctccctggtgttatattgtttggcttttgttctgggaattccaggaaatgccatcgtcatttggttcacggggctcaagtggaagaagacagtcaccactctgtggttcctcaatctagccattgcggatttcatttttcttctctttctgcccctgtacatctcctatgtggccatgaatttccactggccctttggcatctggctgtgcaaagccaattccttcactgcccagttgaacatgtttgccagtgtttttttcctgacagtgatcagcctggaccactatatccacttgatccatcctgtcttatctcatcggcatcgaaccctcaagaactctctgattgtcattatattcatctggcttttggcttctctaattggcggtcctgccctgtacttccgggacactgtggagttcaataatcatactctttgctataacaattttcagaagcatgatcctgacctcactttgatcaggcaccatgttctgacttgggtgaaatttatcattggctatctcttccctttgctaacaatgagtatttgctacttgtgtctcatcttcaaggtgaagaagcgaacagtcctgatctccagtaggcatttctggacaattctggttgtggttgtggcctttgtggtttgctggactccttatcacctgtttagcatttgggagctcaccattcaccacaatagctattcccaccatgtgatgcaggctggaatccccctctccactggtttggcattcctcaatagttgcttgaaccccatcctttatgtcctaattagtaagaagttccaagctcgcttccggtcctcagttgctgagatactcaagtacacactgtgggaagtcagctgttctggcacagtgagtgaacagctcaggaactcagaaaccaagaatctgtgtctcctggaaacagctcaataagttattacttttccacaaatcagtatatggctttttatgtgggtcctctgactgatgctttcagattaaaattgtttccaagatagagagccgactccactttcatagttattgtttctggtcacatatatggcatcacatttt

SEQ ID NO: 103 - DNA, 3609 bp, Homo sapiens
ggcacgaggagccctgagagtccgccgccaacgcgcaggtgctagcggccccttcgccctgcagcccctttgcttttactctgtccaaagttaacatgtcactgaaaaacgagccacgggtaaatacctctgcactgcagaaaattgctgctgacatgagtaatatcatagaaaatctggacacgcgggaactccactttgagggagaggaggtagactacgacgtgtctcccagcgatcccaagatacaagaagtgtatatccctttctctgctatttataacactcaaggatttaaggagcctaatatacagacgtatctctccggctgtccaataaaagcacaagttctggaagtggaacgcttcacatctacaacaagggtaccaagtattaatctttacactattgaattaacacatggggaatttaaatggcaagttaagaggaaattcaagcattttcaagaatttcacagagagctgctcaagtacaaagcctttatccgcatccccattcccactagaagacacacgtttaggaggcaaaacgtcagagaggagcctcgagagatgcccagtttgccccgttcatctgaaaacatgataagagaagaacaattccttggtagaagaaaacaactggaagattacttgacaaagatactaaaaatgcccatgtatagaaactatcatgccacaacagagtttcttgatataagccagctgtctttcatccatgatttgggaccaaagggcatagaaggtatgataatgaaaagatctggaggacacagaataccaggcttgaattgctgtggtcagggaagagcctgctacagatggtcaaaaagatggttaatagtgaaagattcctttttattgtatatgaaaccagacagcggtgccattgccttcgtcctgctggtagacaaagaattcaaaattaaggtggggaagaaggagacagaaacgaaatatggaatccgaattgataatctttcaaggacacttattttaaaatgcaacagctatagacatgctcggtggtggggaggggctatagaagaattcatccagaaacatggcaccaactttctcaaagatcatcgatttgggtcatatgctgctatccaagagaatgctttagctaaatggtatgttaatgccaaaggatattttgaagatgtggcaaatgcaatggaagaggcaaatgaagagatttttatcacagactggtggctgagtccagaaatcttcctgaaacgcccagtggttgagggaaatcgttggaggttggactgcattcttaaacgaaaagcacaacaaggagtgaggatcttcataatgctctacaaagaggtggaactcgctcttggcatcaatagtgaatacaccaagaggactttgatgcgtctacatcccaacataaaggtgatgagacacccggatcatgtgtcatccaccgtctatttgtgggctcaccatgagaagcttgtcatcattgaccaatcggtggcctttgtgggagggattgacctggcctatggaaggtgggacgacaatgagcacagactcacagacgtgggcagtgtgaagcgggtcacttcaggaccgtctctgggttccctcccacctgccgcaatggagtctatggaatccttaagactcaaagataaaaatgagcctgttcaaaacctacccatccagaagagtattgatgatgtggattcaaaactgaaaggaataggaaagccaagaaagttctccaaatttagtctctacaagcagctccacaggcaccacctgcacgacgcagatagcatcagcagcattgacagcacctccagttattttaatcactatagaagtcatcacaatttaatccatggtttaaaaccccacttcaaactctttcacccgtccagtgagtctgagcaaggactcactagacctcatgctgataccgggtccatccgtagtttacagacaggtgtgggagagctgcatggggaaaccagattctggcatggaaaggactactgcaatttcgtcttcaaagactgggttcaacttgataaaccttttgctgatttcattgacaggtactccacgccccggatgccctggcatgacattgcctctgcagtccacgggaaggcggctcgtgatgtggcacgtcacttcatccagcgctggaacttcacaaaaattatgaaatcaaaatatcggtccctttcttatccttttctgcttccaaagtctcaaacaacagcccatgagttgagatatcaagtgcctgggtctgtccatgctaacgtacagttgctccgctctgctgctgattggtctgctggtataaagtaccatgaagagtccatccacgccgcttacgtccatgtgatagagaacagcaggcactatatctatatcgaaaaccagtttttcataagctgtgctgatgacaaagttgtgttcaacaagataggcgatgccattgcccagaggatcctgaaagctcacagggaaaaccagaaataccgggtatatgtcgtgataccacttctgccagggttcgaaggagacatttcaaccggcggaggaaatgctctacaggcaatcatgcacttcaactacagaaccatgtgcagaggagaaaattccatccttggacagttaaaagcagagcttggtaatcagtggataaattacatatcattctgtggtcttagaacacatgcagagctcgaaggaaacctagtaactgagcttatctatgtccacagcaagttgttaattgctgatgataacactgttattattggctctgccaacataaatgaccgcagcatgctgggaaagcgtgacagtgaaatggctgtcattgtgcaagatacagagactgttccttcagtaatggatggaaaagagtaccaagctggccggtttgcccgaggacttcggctacagtgctttagggttgtccttggctatcttgatgacccaagtgaggacattcaggatccagtgagtgacaaattcttcaaggaggtgtgggtttcaacagcagctcgaaatgctacaatttatgacaaggttttccggtgccttcccaatgatgaagtacacaatttaattcagctgagagactttataaacaagcccgtattagctaaggaagatcccattcgagctgaggaggaactgaagaagatccgtggatttttggtgcaattccccttttatttcttgtctgaagaaagcctactgccttctgttgggaccaaagaggccatagtgcccatggaggtttggacttaagagatattcattggcagctcaaagacttccaccctggagaccacactgcacacagtgacttcctggggatgtcatagccaaagccaggcctgacgcattctcgtatccaacccaaggaccttttggaatgactggggagggctgcagtcacattgatgtaaggactgtaaacatcagcaagactttataattccttctgcctaacttgtaaaaagggggctgcattcttgttggtagcatgtactctgttgagtaaaacacatattcaaattccgctcgtgccgaattc

SEQ ID NO: 104 - DNA, 425 bp, Homo sapiens
  modified_base (162): a, t, c, g, other or unknown
  modified_base (180): a, t, c, g, other or unknown
  modified_base (245): a, t, c, g, other or unknown
  modified_base (284): a, t, c, g, other or unknown
  modified_base (305): a, t, c, g, other or unknown
  modified_base (319): a, t, c, g, other or unknown
  modified_base (352): a, t, c, g, other or unknown
  modified_base (371): a, t, c, g, other or unknown
  modified_base (413): a, t, c, g, other or unknown
  modified_base (422): a, t, c, g, other or unknown
ctctcaatgggcgcacgggctacgttctgcagcctgagagcatgaggacagagaaatatgacccgatgccacccgagtcccagaggaagatcctgatgacgctgacagtcaaggttctcggtgctcgccatctccccaaacttggacgaagtattgcctgtncctttgtagaagtggagntctgtggagccgagtatgacaacaacaagttcaagacgacggttgtgaatgataatggcctcagncctatctgggctccaacacaggagaaggtgacatttganatttatgacccaaacctgggnattttttgcgcttngtggtttattgaaggaaggtattgtttcagcgnttccccaattttttttggntcatggccactttacccctttaaaggcagtcaaaatcagggnttcagggtncct

SEQ ID NO: 105 - DNA, 868 bp, Homo sapiens
caggtcaacggatcatctgtttctgaccattccttcccgttcctgaccccagggagtgcagggtgtcctagccaagccggcgtccctcctagtagtaccgctgctctctaacctcaggacgtcaagggcctagagcgacagatgtttcccagcagggggttctgaggctgtgcgcccagatcgcgagagaggcaagtggggtgacgaggtcgtgcactgagggtggacgtagaggccaggagtagcaggcggccggggaaaagaggtggagaaaggaaaaaagaggagaaaagtggaggagggcgagtaggggggtggggcagagaggggcgggcccgagtgcgccccccgcccccagccccgctctgccagctccctcccagcccagccggctacatctggcggctgccctcccttgtttccgctgcatccagacttcctcaggcggtggctggaggctgcgcatctggggctttaaacatacaaagggattgccaggacctgcggcggcggcggcggcggcgggggctggggcgcgggggccggaccatgagccgctgagccgggcaaaccccaggccaccgagccagcggaccctcggagcgcagccctgcgccgcggaccaggctccaaccaggcggcgaggcggccacacgcaccgagccagcgacccccgggcgacgcgcggggccagggagcgctacgatggaggcgctaatggcccggggcgcgctcacgggtcccctgagggcgctctgtctcctgggctgcctgctgagccacgccgccgccgcgccgtcgcccatcatcaagttccccggcgatgtcgcccccaaaacggacaaagagttggcagtggtgagttgct

SEQ ID NO: 106 - DNA, 1766 bp, Homo sapiens
cgcgccaccgccgccgcccaggccatcgccaccctccgcagccatgtccaccaggtccgtgtcctcgtcctcctaccgcaggatgttcggcggcccgggcaccgcgagccggccgagctccagccggagctacgtgactacgtccacccgcacctacagcctgggcagcgcgctgcgccccagcaccagccgcagcctctacgcctcgtccccgggcggcgtgtatgccacgcgctcctctgccgtgcgcctgcggagcagcgtgcccggggtgcggctcctgcaggactcggtggacttctcgctggccgacgccatcaacaccgagttcaagaacacccgcaccaacgagaaggtggagctgcaggagctgaatgaccgcttcgccaactacatcgacaaggtgcgcttcctggagcagcagaataagatcctgctggccgagctcgagcagctcaagggccaaggcaagtcgcgcctgggggacctctacgaggaggagatgcgggagctgcgccggcaggtggaccagctaaccaacgacaaagcccgcgtcgaggtggagcgcgacaacctggccgaggacatcatgcgcctccgggagaaattgcaggaggagatgcttcagagagaggaagccgaaaacaccctgcaatctttcagacaggatgttgacaatgcgtctctggcacgtcttgaccttgaacgcaaagtggaatctttgcaagaagagattgcctttttgaagaaactccacgaagaggaaatccaggagctgcaggctcagattcaggaacagcatgtccaaatcgatgtggatgtttccaagcctgacctcacggctgccctgcgtgacgtacgtcagcaatatgaaagtgtggctgccaagaacctgcaggaggcagaagaatggtacaaatccaagtttgctgacctctctgaggctgccaaccggaacaatgacgccctgcgccaggcaaagcaggagtccactgagtaccggagacaggtgcagtccctcacctgtgaagtggatgcccttaaaggaaccaatgagtccctggaacgccagatgcgtgaaatggaagagaactttgccgttgaagctgctaactaccaagacactattggccgcctgcaggatgagattcagaatatgaaggaggaaatggctcgtcaccttcgtgaataccaagacctgctcaatgttaagatggcccttgacattgagattgccacctacaggaagctgctggaaggcgaggagagcaggatttctctgcctcttccaaacttttcctccctgaacctgagggaaactaatctggattcactccctctggttgatacccactcaaaaaggacacttctgattaagacggttgaaactagagatggacaggttatcaacgaaacttctcagcatcacgatgaccttgaataaaaattgcacacactcagtgcagcaatatattaccagcaagaataaaaaagaaatccatatcttaaagaaacagctttcaagtgcctttctgcagtttttcaggagcgcaagatagatttggaataggaataagctctagttcttaacaaccgacactcctacaagatttagaaaaaagtttacaacataatctagtttacagaaaaatcttgtgctagaatactttttaaaaggtattttgaataccattaaaactgcttttttttttccagcaagtatccaaccaacttggttctgcttcaataaatctttggaaaaacta

SEQ ID NO: 107 - DNA, 553 bp, Homo sapiens
tttttttttttccgtgccatgagcttgttttattggagtgaccttggctccctccctctgcccctactccaacactgcagcaaccccatctcttacgagactggcaggtggagcaggagcctctacacagcctctggtccttaggtcccagtcatgtttgcaccccctcaaagggctaggaccagcccttcctttcagtgtccataccaggggccttccatgtgctgatgggtgatgtgactgtggtcagcaggcttgggaagtgctgctgctgtagcttgagttgggctggggtcttggtaggacgctgatctcagaagtccccaaagttcactgtgtaggtctctactgttgtgaaggggaatgcctggccagtgcgtatctcctcctctttctcccttctccttctcttcctcaaactcgggtttcaactgggtctcaaactcagactccaactgggtctcaaacactggctccaaccttgggcccaaacttcggggttcacctcggtcccaaactctggtaacaactctgtgtaaggctcagtttccgc

SEQ ID NO: 108 - DNA, 401 bp, Homo sapiens
  modified_base (341): a, t, c, g, other or unknown
ggagaaatggggcacctgtctagatcttgtcctgataatcccaaaggactctatgctgatggtggcggttgcaaactttgtggctctgtggaacatttaaagaaagattgccctgaaagtcagaattcagagcgaatggtcacagttggtcgctgggcaaagggaatgagtgcagactatgaagaaattttggatgtacctaaaccgcaaaaacccaaaacaaaaatacctaaagttgttaatttttgataacagctagcactatcatgagttactacctcattgttactttctaaacccaggccccgcttcacaagttagagttgagctcccccttgtangccaggactatgcctgtaagatatccagtaatgatcctggggtgttggccaaaaaccaat

SEQ ID NO: 109 - DNA, 3787 bp, Homo sapiens
tggagtgggctgagggactccactagaggctgtccatctggattccctgcctccctaggagcccaacagagcaaagcaagtgggcacaaggagtatggttctaacgtgattggggtcatgaagacgttgctgttggacttggctttgtggtcactgctcttccagcccgggtggctgtcctttagttcccaggtgagtcagaactgccacaatggcagctatgaaatcagcgtcctgatgatgggcaactcagcctttgcagagcccctgaaaaacttggaagatgcggtgaatgaggggctggaaatagtgagaggacgtctgcaaaatgctggcctaaatgtgactgtgaacgctactttcatgtattcggatggtctgattcataactcaggcgactgccggagtagcacctgtgaaggcctcgacctactcaggaaaatttcaaatgcacaacggatgggctgtgtcctcatagggccctcatgtacatactccaccttccagatgtaccttgacacagaattgagctaccccatgatctcagctggaagttttggattgtcatgtgactataaagaaaccttaaccaggctgatgtctccagctagaaagttgatgtacttcttggttaacttttggaaaaccaacgatctgcccttcaaaacttattcctggagcacttcgtatgtttacaagaatggtacagaaactgaggactgtttctggtaccttaatgctctggaggctagcgtttcctatttctcccacgaactcggctttaaggtggtgttaagacaagataaggagtttcaggatatcttaatggaccacaacaggaaaagcaatgtgattattatgtgtggtggtccagagttcctctacaagctgaagggtgaccgagcagtggctgaagacattgtcattattctagtggatcttttcaatgaccagtacttggaggacaatgtcacagcccctgactatatgaaaaatgtccttgttctgacgctgtctcctgggaattcccttctaaatagctctttctccaggaatctatcaccaacaaaacgagactttcgtcttgcctatttgaatggaatcctcgtctttggacatatgctgaagatatttcttgaaaatggagaaaatattaccacccccaaatttgctcatgccttcaggaatctcacttttgaagggtatgacggtccagtgaccttggatgactggggggatgttgacagtaccatggtgcttctgtatacctctgtggacaccaagaaatacaaggttcttttgacctatgatacccacgtaaataagacctatcctgtggatatgagccccacattcacttggaagaactctaaacttcctaatgatattacaggccggggccctcagatcctgatgattgcagtcttcaccctcactggagctgtggtgctgctcctgctcgtcgctctcctgatgctcagaaaatatagaaaagattatgaacttcgtcagaaaaaatggtcccacattcctcctgaaaatatctttcctctggagaccaatgagaccaatcatgttagcctcaagatcgatgatgacaaaagacgagatacaatccagagactacgacagtgcaaatacgtcaaaaagcgagtgattctcaaagatctcaagcacaatgatggtaatttcactgaaaaacagaagatagaattgaacaagttgcttcagattgactattacaccctaaccaagttctacgggacagtgaaactggataccatgatcttcggggtgatagaatactgtgagagaggatccctccgggaagttttaaatgacacaatttcctaccctgatggcacattcatggattgggagtttaagatctctgtcttgtatgacattgctaagggaatgtcatatctgcactccagtaagacagaagtccatggtcgtctgaaatctaccaactgcgtagtggacagtagaatggtggtgaagatcactgattttggctgcaattccattttgcctccaaaaaaggacctgtggacagctccagagcacctccgccaagccaacatctctcagaaaggagatgtgtacagctatgggatcatcgcacaggagatcattctgcggaaagaaaccttctacactttgagctgtcgggaccggaatgagaagattttcagagtggaaaattccaatggaatgaaacccttccgcccagatttattcttggaaacagcagaggaaaaagagctagaagtgtacctacttgtaaaaaactgttgggaggaagatccagaaaagagaccagatttcaaaaaaattgagactacacttgccaagatatttggactttttcatgaccaaaaaaatgaaagctatatggataccttgatccgacgtctacagctatattctcgaaacctggaacatctggtagaggaaaggacacagctgtacaaggcagagagggacagggctgacagacttaactttatgttgcttccaaggctagtggtaaagtctctgaaggagaaaggctttgtggagccggaactatatgaggaagttacaatctacttcagtgacattgtaggtttcactactatctgcaaatacagcacccccatggaagtggtggacatgcttaatgacatctataagagttttgaccacattgttgatcatcatgatgtctacaaggtggaaaccatcggtgatgcgtacatggtggctagtggtttgcctaagagaaatggcaatcggcatgcaatagacattgccaagatggccttggaaatcctcagcttcatggggacctttgagctggagcatcttcctggcctcccaatatggattcgcattggagttcactctggtccctgtgctgctggagttgtgggaatcaagatgcctcgttattgtctatttggagatacggtcaacacagcctctaggatggaatccactggcctccctttgagaattcacgtgagtggctccaccatagccatcctgaagagaactgagtgccagttcctttatgaagtgagaggagaaacatacttaaagggaagaggaaatgagactacctactggctgactgggatgaaggaccagaaattcaacctgccaacccctcctactgtggagaatcaacagcgtttgcaagcagaattttcagacatgattgccaactctttacagaaaagacaggcagcagggataagaagccaaaaacccagacgggtagccagctataaaaaaggcactctggaatacttgcagctgaataccacagacaaggagagcacctatttttaaacctaaatgaggtataaggactcacacaaattaaaatacagctgcactgaggccaggcaccctcaggtgtcctgaaagcttactttcctgagacctcatgaggcagaaatgtcttaggcttggctgccctgtttggaccatggactttctttgcatgaatcagatgtgttctcagtgaaataactaccttccactctggaaccttattccagcagttgttccagggagcttctacctggaaaagaaaagaatttcatttattttttgtttgtttatttttatcgtttttgtttactggctttccttctgtattcataagattttttaaattgtcataattatattttaaatacccatcttcattaaagtatatttaactcataatttttgcagaaaatatgctatatattaggcaagaataaaagctaaaggtttcccaaaaaaaaaa

SEQ ID NO: 110 - DNA, 738 bp, Homo sapiens
atggcggcggctatcgccagctcgctcatccgtcagaagaggcaagcccgcgagcgcgagaaatccaacgcctgcaagtgtgtcagcagccccagcaaaggcaagaccagctgcgacaaaaacaagttaaatgtcttttcccgggtcaaactcttcggctccaagaagaggcgcagaagaagaccagagcctcagcttaagggtatagttaccaagctatacagccgacaaggctaccacttgcagctgcaggcggatggaaccattgatggcaccaaagatgaggacagcacttacactctgtttaacctcatccctgtgggtctgcgagtggtggctatccaaggagttcaaaccaagctgtacttggcaatgaacagtgagggatacttgtacacctcggaacttttcacacctgagtgcaaattcaaagaatcagtgtttgaaaattattatgtgacatattcatcaatgatataccgtcagcagcagtcaggccgagggtggtatctgggtctgaacaaagaaggagagatcatgaaaggcaaccatgtgaagaagaacaagcctgcagctcattttctgcctaaaccactgaaagtggccatgtacaaggagccatcactgcacgatctcacggagttctcccgatctggaagcgggaccccaaccaagagcagaagtgtctctggcgtgctgaacggaggcaaatccatgagccacaatgaatcaacgtag

SEQ ID NO: 111 - DNA, 769 bp, Homo sapiens
ggatcccacaaaacaaaaaatatttttttggctgtacttttgtgaagattttatttaaattcctgattgatcagtgtctattaggtgatttggaataacaatgtaaaaacaatatacaacgaaaggaagctaaaaatctatacacaattcctagaaaggaaaaggcaaatatagaaagtggcggaagttcccaacatttttagtgttttccttttgaggcagagaggacaatggcattaggctattggaggatcttgaaaggctgttgttatccttctgtggacaacaacagcaaaatgttaacagttaaacatcgagaaatttcaggaggatctttcagaagatgcgtttccaattttgagggggcgtcagctcttcaccggagacccaaatacaacaaatcaagtcgcctgccctggcgacactttcgaaggactggagtgggaatcagagcttcacgggttaaaagccgatgtcacatcggccgttcgaaactcctcctcttgcagtgaggtgaagacatttgaaaatcaccccactgcaaactcctccccctgctagaaacctcacattgaaatgctgtaaatgacgtgggccccgagtgcaatcgcgggaagccagggtttccagctaggacacagcaggtcgtgatccgggtcgggacactgcctggcagaggctgcgagcatggggccctggggctggaaattgcgctggaccgtcgccttgctcctcgccgcggcggggactgcaggtaaggcttgctcca

SEQ ID NO: 112 - DNA, 448 bp, Homo sapiens
  modified_base (289): a, t, c, g, other or unknown
  modified_base (312): a, t, c, g, other or unknown
  modified_base (339): a, t, c, g, other or unknown
  modified_base (377): a, t, c, g, other or unknown
  modified_base (429): a, t, c, g, other or unknown
  modified_base (435): a, t, c, g, other or unknown
ggatctggtctcccacaatgaaggtcttgcctccctggttctgggacagcagggtctcaaaaggcttcagttgcccgggcagtgcttcacatagtcatccttgcccgcctcatagttggtgtagatgagggagatgtatttgcagcggaggtcctccacgccgtcattcaccatgtccaccagggctgcctcctgctggtccttcccatagagcccaagggtgcgggcccagggtgacgcaggatggtattggactggtacagggtgaggtctccgtcctgggaacttnggggagctgcccgtattaggcanggaggcttttgagttgagccctccttncggccgcaagcttatttcccttttagttgagggttaantttaagtttggcaattggccttctttttaaaaacttcgtgatttgggaaaanctgggntttaaccaattta

SEQ ID NO: 113 - DNA, 3939 bp, Homo sapiens
cctgggtcctctcggcgccagagccgctctccgcatcccaggacagcggtgcggccctcggccggggcgcccactccgcagcagccagcgagccagctgccccgtatgaccgcgccgggcgccgccgggcgctgccctcccacgacatggctgggctccctgctgttgttggtctgtctcctggcgagcaggagtatcaccgaggaggtgtcggagtactgtagccacatgattgggagtggacacctgcagtctctgcagcggctgattgacagtcagatggagacctcgtgccaaattacatttgagtttgtagaccaggaacagttgaaagatccagtgtgctaccttaagaaggcatttctcctggtacaagacataatggaggacaccatgcgcttcagagataacaccgccaatcccatcgccattgtgcagctgcaggaactctctttgaggctgaagagctgcttcaccaaggattatgaagagcatgacaaggcctgcgtccgaactttctatgagacacctctccagttgctggagaaggtcaagaatgtctttaatgaaacaaagaatctccttgacaaggactggaatattttcagcaagaactgcaacaacagctttgctgaatgctccagccaagatgtggtgaccaagcctgattgcaactgcctgtaccccaaagccatccctagcagtgacccggcctctgtctcccctcatcagcccctcgccccctccatggcccctgtggctggcttgacctgggaggactctgagggaactgagggcagctccctcttgcctggtgagcagcccctgcacacagtggatccaggcagtgccaagcagcggccacccaggagcacctgccagagctttgagccgccagagaccccagttgtcaaggacagcaccatcggtggctcaccacagcctcgcccctctgtcggggccttcaaccccgggatggaggatattcttgactctgcaatgggcactaattgggtcccagaagaagcctctggagaggccagtgagattcccgtaccccaagggacagagctttccccctccaggccaggagggggcagcatgcagacagagcccgccagacccagcaacttcctctcagcatcttctccactccctgcatcagcaaagggccaacagccggcagatgtaactgctacagccttgcccagggtgggccccgtgatgcccactggccaggactggaatcacaccccccagaagacagaccatccatctgccctgctcagagaccccccggagccaggctctcccaggatctcatcactgcgcccccaggccctcagcaacccctccaccctctctgctcagccacagctttccagaagccactcctcgggcagcgtgctgccccttggggagctggagggcaggaggagcaccagggatcggacgagccccgcagagccagaagcagcaccagcaagtgaaggggcagccaggcccctgccccgttttaactccgttcctttgactgacacaggccatgagaggcagtccgagggatcctccagcccgcagctccaggagtctgtcttccacctgctggtgcccagtgtcatcctggtcttgctggctgtcggaggcctcttgttctacaggtggaggcggcggagccatcaagagcctcagagagcggattctcccttggagcaaccagagggcagccccctgactcaggatgacagacaggtggaactgccagtgtagagggaattctaagctggacgcacagaacagtctcttcgtgggaggagacattatggggcgtccaccaccacccctccctggccatcctcctggaatgtggtctgccctccaccagagctcctgcctgccaggactggaccagagcagccaggctggggcccctctgtctcaacccgcagacccttgactgaatgagagaggccagaggatgctccccatgctgccactatttattgtgagccctggaggctcccatgtgcttgaggaaggctggtgagcccggctcaggaccctcttccctcaggggctgcagcctcctctcactcccttccatgccggaacccaggccagggacccaccggcctgtggtttgtgggaaagcagggtgcacgctgaggagtgaaacaaccctgcacccagagggcctgcctggtgccaaggtatcccagcctggacaggcatggacctgtctccagacagaggagcctgaagttcgtggggcgggacagcctcggcctgatttcccgtaaaggtgtgcagcctgagagacgggaagaggaggcctctgcacctgctggtctgcactgacagcctgaagggtctacaccctcggctcacctaagtccctgtgctggttgccaggcccagaggggaggccagccctgccctcaggacctgcctgacctgccagtgatgccaagagggggatcaagcactggcctctgcccctcctccttccagcacctgccagagcttctccagcaggccaagcagaggctcccctcatgaaggaagccattgcactgtgaacactgtacctgcctgctgaacagcctccccccgtccatccatgagccagcatccgtccgtcctccactctccagcctctccccagcctcctgcactgagctggcctcaccagtcgactgagggagcccctcagccctgaccttctcctgacctggcctttgactccccggagtggagtggggtgggagaacctcctgggccgccagccagagccgctctttaggctgtgttcttcgcccaggtttctgcatcttccactttgacattcccaagagggaagggactagtgggagagagcaagggaggggagggcacagacagagagcctacagggcgagctctgactgaagatgggcctttgaaatataggtatgcacctgaggttgggggagggtctgcactcccaaaccccagcgcagtgtcctttccctgctgccgacaggaacctggggctgagcaggttatccctgtcaggagccctggactgggctgcatctcagccccacctgcatggtatccagctcccatccacttctcacccttctttcctcctgaccttggtcagcagtgatgacctccaactctcacccaccccctctaccatcacctctaaccaggcaagccagggtgggagagcaatcaggagagccaggcctcagcttccaatgcctggagggcctccactttgtggccagcctgtggtgctggctctgaggcctaggcaacgagcgacagggctgccagttgcccctgggttcctttgtgctgctgtgtgcctcctctcctgccgccctttgtcctccgctaagagaccctgccctacctggccgctgggccccgtgactttcccttcctgcccaggaaagtgagggtcggctggccccaccttccctgtcctgatgccgacagcttagggaagggcactgaacttgcatatggggcttagccttctagtcacagcctctatatttgatgctagaaaacacatatttttaaatggaagaaaaataaaaaggcattcccccttcatccccctaccttaaacatataatattttaaaggtcaaaaaagcaatccaacccactgcagaagctctttttgagcacttggtggcatcagagcaggaggagccccagagccacctctggtgtcccccaggctacctgctcaggaaccccttctgttctctgagaactcaacagaggacattggctcacgcactgtgagattttgtttttatacttgcaactggtgaattattttttataaagtcatttaaatatctatttaaaagataggaagctgcttatatatttaataataaaagaagtgcacaagctgccgttgacgtagctcgag

SEQ ID NO: 114 - DNA, 516 bp, Homo sapiens
ggcgccgccattttagcgttttgtcagaagcgtccgcgccgagcggcaggaggccctgctggtttctgtgcgggctcttgtcaggatggtgaagctgttcatcggaaacctgccccgggaggctacagagcaggagattcgctcactcttcgagcagtatgggaaggtgctggaatgtgacatcattaagaattacggctttgtgcacatagaagacaagacggcagctgaggatgccatacgcaacctgcaccattacaagcttcatggggtgaacatcaacgtggaagccagcaagaataagagcaaaacctcaacaaagttgcatgtgggcaacatcagtcccacctgcaccaataaggagcttcgagccaagtttgaggagtatggtccggtcatcgaatgtgacatcgtgaaagattatgccttcgtacacatggagcgggcagaggatgcagtggaggccatcaggggccttgataacacagagtttcaaggtgggatgtgtgtgggctg

SEQ ID NO: 115 - DNA, 780 bp, Homo sapiens
ggatataggcgcccccacacccgggcccggctaagcgccgccgccgctcctcgcctccttgctgcacgatggcctcgctccgggtggagcgcgccggcggcccgcgtctccctaggacccgagtcgggcggccggcagccgtccgcctcctccttctgctgggcgctgtcctgaatccccacgaggccctggctcagcctcttcccaccacaggcacaccagggtcagaaggggggacggtgaagaactatgagacagctgtccaattttgctggaatcattataaggatcaaatggatcctatcgaaaaggattggtgcgactgggccatgattagcaggccttatagcaccctgcgagattgcctggagcactttgcagagttgtttgacctgggcttccccaatcccttggcagagaggatcatctttgagactcaccagatccactttgccaactgctccctggtgcagcccaccttctctgaccccccagaggatgtactcctggccatgatcatagcccccatctgcctcatccccttcctcatcactcttgtagtatggaggagtaaagacagtgaggcccaggcctagggggcacgagcttctcaacaaccatgttactccacttccccacccccaccaggcctccctcctcccctcctactcccttttctcactctcatccccaccacagatccctggattgctgggaatggaagccagggttgggcatggcacaagttctgtaatcttcaaaataaaactttttttttga

SEQ ID NO: 116 - DNA, 641 bp, Homo sapiens
ttttttcttcttatattctactttatttggtaaaactcagaaactaacaattcacatcctcccaccttcttctttccgaagaaggcagtttgcagagacaaaagggctgtggcgtggggatcatccaccatctccaggttttacacccaggctacccatggcttggcagtcaggcctctaggcgatgctctcagaggcaatagaagaaaagtaaaaggaaggtctcacttcacagacaatgaaaccctcctaaccctcttccccactacccacaactccctacactgccaatctaaataaaaagaggacaatgcatgagtgtgagatacacatacacacacacacatacacacacacacacgcacagcttcctttcagccaaagaactgcaaaatccttccccggaaggaggacaactggcaacaccaatcaaggcttggtggtctaaggtgatggctggaatcatgtgagactggtaaaaatccagggagaaaatgtttcaccttcagctcattcccaagtctctatgaagcccgccccacttccacataggggaactgtggctctgggggcagctggcttagggaaaggcctcccatggccaagaagacgatggtggagaggagggggagggcagcagg

SEQ ID NO: 117 - DNA, 946 bp, Homo sapiens
  modified_base (412): a, t, c, g, other or unknown
  modified_base (437): a, t, c, g, other or unknown
  modified_base (443): a, t, c, g, other or unknown
  modified_base (449): a, t, c, g, other or unknown
  modified_base (466): a, t, c, g, other or unknown
  modified_base (469): a, t, c, g, other or unknown
  modified_base (886): a, t, c, g, other or unknown
tgttcatgctcattgctgtttattgaaacaaaagaatcagaagaagatcagaatgaagacaataataaaaagcagaagcagaagtacaagaagaataaagaaagaaagggaaagaattgtaggaaggaaaaacttgtagaagtagagggtggagagtgcgaagaggtggagtatgatgggcagtccgatcttttccatctgggctttcagacaatgggatatgtcatggaaggcttctttaaacaccagaagaaattcaggataaagctcaaaaagagcaggcaatcgataggggttgaaaatccactcagtaggccacggaaggacttcaagaaggttgatcgttctgtcgctggatgttgtaggtgtcctacgtgaaggcaatcgacatctggatggctgtgtgtctgcnctttgtgttcgctgccttgctggantatgcngttctnactgttggatttcttcntcntgatcttcattgggtgcattagagttgttgggcttgagttgttgttctccctcactcttttctgttaacctcatttcttctacagtaaagtgatcacttggtttgctttcctgcactcttcttgacactccagtcaacattagccaaagcagggaacaagatatttctaatgtattttgaggcttggaaagacaagtcatcatggttaaacaacagagtactattaggggcttgggctagaggcaggtgaagttcaaatcctggttcccatacttgttgcgtacacagtcccgacgccaggggcgcacgcctgcgcaaacacagcacctcccgagccacgagggccgctcacacagcaaccccagcaccacgcgagcctgcccgcgcactaacacactggccttaatgccttgcgcncgttgcactcacgaccctcacttgcaaacacagcagaacccccactgcgccttttttttc

SEQ ID NO: 118 - DNA, 455 bp, Homo sapiens
cactaggtcagtgcatctgcttaatctgtggagaccgccagaccgttgaggaaccgacaaaagtagataagctacaagaaccattgctggaacactaaaaatttatatcagaaaaagacgacccagcaagcctcacatgtttccaaagatcttaatgaaaatcacagatctccgtagcatcagtgctaaaggtgcagagcgtgtaattaccttgaaaatggaaattcctggatcaatgccacctctcattcaagaaatgctggagaattctgaaggacatgaacccttgaccccaagttcaagtgggaacacagcagacacagtcctagcatctcacccagctcagtggaaaacagtggggtcagtcagtcaccactcgtgcaataagacattttctagctacttcaaacattccccagtaccttcagttccaggatttaaaatgcaagaaaaaa

SEQ ID NO: 119 - DNA, 1460 bp, Homo sapiens
gcacacgggaagatatcagaaacatcctaggatcaggacaccccagatcttctcaactggaaccacgaaggctgtttcttccacacagcactttgatctccatttaagcaggcacctctgtcctgcgttccggagctgcgttcccgatggtcctcctttggctcacgctgctcctgatcgccctgccctgtctcctgcaaacgaaggaagatccaaacccaccaatcacgaacctaaggatgaaagcaaaggctcagcagttgacctgggaccttaacagaaatgtgaccgatatcgagtgtgttaaagatgccgactattctatgccggcagtgaacaatagctattgccagtttggagcaatttccttatgtgaagtgaccaactacaccgtccgagtggccaacccaccattctccacgtggatcctcttccctgagaacagtgggaagccttgggcaggtgcggagaatctgacctgctggattcatgacgtggatttcttgagctgcagctgggcggtaggcccgggggcccccgcggacgtccagtacgacctgtacttgaacgttgccaacaggcgtcaacagtacgagtgtcttcactacaaaacggatgctcagggaacacgtatcgggtgtcgtttcgatgacatctctcgactctccagcggttctcaaagttcccacatcctggtgcggggcaggagcgcagccttcggtatcccctgcacagataagtttgtcgtcttttcacagattgagatattaactccacccaacatgactgcaaagtgtaataagacacattcctttatgcactggaaaatgagaagtcatttcaatcgcaaatttcgctatgagcttcagatacaaaagagaatgcagcctgtaatcacagaacaggtcagagacagaacctccttccagctactcaatcctggaacgtacacagtacaaataagagcccgggaaagagtgtatgaattcttgagcgcctggagcaccccccagcgcttcgagtgcgaccaggaggagggcgcaaacacacgtgcctggcggacgtcgctgctgatcgcgctggggacgctgctggccctggtctgtgtcttcgtgatctgcagaaggtatctggtgatgcagagactctttccccgcatccctcacatgaaagaccccatcggtgacagcttccaaaacgacaagctggtggtctgggaggcgggcaaagccggcctggaggagtgtctggtgactgaagtacaggtcgtgcagaaaacttgagactggggttcagggcttgtgggggtctgcctcaatctccctggccgggccaggcgcctgcacagactggctgctggacctgcgcacgcagcccaggaatggacattcctaacgggtggtgggcatgggagatgcctgtgtaatttcgtccgaagctgccaggaagaagaacagaac

SEQ ID NO: 120 - DNA, 2716 bp, Homo sapiens
ccgggtaaaccatggctgtgtggatacaagctcagcagctccaaggagaagcccttcatcagatgcaggcgttatatggccagcattttcccattgaggtgcggcattatttatcccagtggattgaaagccaagcatgggactcagtagatcttgataatccacaggagaacattaaggccacccagctcctggagggcctggtgcaggagctgcagaagaaggcagagcaccaggtgggggaagatgggtttttactgaagatcaagctggggcactatgccacacagctccagaacacgtatgaccgctgccccatggagctggtccgctgcatccgccatatattgtacaatgaacagaggttggtccgagaagccaacaatggtagctctccagctggaagccttgctgatgccatgtcccagaaacacctccagatcaaccagacgtttgaggagctgcgactggtcacgcaggacacagagaatgagttaaaaaagctgcagcagactcaggagtacttcatcatccagtaccaggagagcctgaggatccaagctcagtttggcccgctggcccagctgagcccccaggagcgtctgagccgggagacggccctccagcagaagcaggtgtctctggaggcctggttgcagcgtgaggcacagacactgcagcagtaccgcgtggagctggccgagaagcaccagaagaccctgcagctgctgcggaagcagcagaccatcatcctggatgacgagctgatccagtggaagcggcggcagcagctggccgggaacggcgggccccccgagggcagcctggacgtgctacagtcctggtgtgagaagttggccgagatcatctggcagaaccggcagcagatccgcagggctgagcacctctgccagcagctgcccatccccggcccagtggaggagatgctggccgaggtcaacgccaccatcacggacattatctcagccctggtgaccagcacgttcatcattgagaagcagcctcctcaggtcctgaagacccagaccaagtttgcagccactgtgcgcctgctggtgggcgggaagctgaacgtgcacatgaaccccccccaggtgaaggccaccatcatcagtgagcagcaggccaagtctctgctcaagaacgagaacacccgcaatgattacagtggcgagatcttgaacaactgctgcgtcatggagtaccaccaagccacaggcacccttagtgcccacttcaggaatatgtccctgaaacgaattaagaggtcagaccgtcgtggggcagagtcggtgacagaagaaaaatttacaatcctgtttgaatcccagttcagtgttggtggaaatgagctggtttttcaagtcaagaccctgtccctgccagtggtggtgatcgttcatggcagccaggacaacaatgcgacggccactgttctctgggacaatgcttttgcagagcctggcagggtgccatttgccgtgcctgacaaagtgctgtggccacagctgtgtgaggcgctcaacatgaaattcaaggccgaagtgcagagcaaccggggcctgaccaaggagaacctcgtgttcctggcgcagaaactgttcaacaacagcagcagccacctggaggactacagtggcctgtctgtgtcctggtcccagttcaacagggagaatttaccaggacggaattacactttctggcaatggtttgacggtgtgatggaagtgttaaaaaaacatctcaagcctcattggaatgatggggccattttggggtttgtaaacaagcaacaggcccatgacctactcattaacaagccagatgggaccttcctcctgagattcagtgactcagaaattggcggcatcaccattgcttggaagtttgattctcaggaaagaatgttttggaatctgatgccttttaccaccagagacttctccatccggtccctagccgaccgcttgggagacttgaattaccttatctacgtgtttcctgatcggccaaaagatgaagtatactccaaatactacacaccagttccctgcgagtctgctactgctaaagctgttgatggatacgtgaagccacagatcaagcaagtggtccctgagtttgtgaacgcatctgcagatgccgggggcggcagcgccacgtacatggaccaggccccctccccagctgtgtgtccccaggctcactataacatgtacccacagaaccctgactcagtccttgacaccgatggggacttcgatctggaggacacaatggacgtagcgcggcgtgtggaggagctcctgggccggccaatggacagtcagtggatcccgcacgcacaatcgtgaccccgcgacctctccatcttcagcttcttcatcttcaccagaggaatcactcttgtggatgttttaattccatcaatcgcttctcttttgaaaacaatactcataatgtgaagtgttaatactagttgtgaccttagtgtttctgtgcatggtggcaccagcgaaggggagtgcgagtatgtgtttgtgtgtgtgtgtgtgtgtgtgtgtgtgtgcgtgtttgcacgttatggtgtttctccctctcactgtctgagagtttagttgtagcagaggggccacagacagaagctgtggtggtttttactttgtgcaaaaaggcagtgagtttcgtgaagcct

SEQ ID NO: 121 - DNA, 389 bp, Homo sapiens
  modified_base (380): a, t, c, g, other or unknown
  modified_base (389): a, t, c, g, other or unknown
tgtgtcctcagggagcagggaaggcctgacttctgctggcatcaagaggtgggagggccctccgaccacttccaggggaacctgccatgccaggaacctgtcctaaggaaccttccttcctgcttgagttcccagatggctggaaggggtccagcctcgttggaagaggaacagcactggggagtctttgtggattctgaggccctgcccaatgagactctagggtccagtggatgccacagcccagcttggccctttccttccagatcctgggtactgaaagccttagggaagctggcctgagaggggaagcggccctaagggaagtgtctaagaacaaaagcgacccattcagagactgtccctgaaacctagtactnccccccatn

SEQ ID NO: 122 - DNA, 3625 bp, Homo sapiens
ggccaccggagcggcccggcgacgatcgctgacagcttcccctgcccttcccgtcggtcgggccgccagccgccgcagccctcggcctgcacgcagccaccggccccgctcccggagcccagcgccgccgaggccgcagccgcccggccagtaaggcggcgccgcccgcggccaccgcgggccctgccgttccctccgccgcgctgcgccatggcgcggcgctgactggcctggcccggccccgccgcgctcccgctcgccccgacccgcactcgggcccgcccgggctccggcctgccgccgcctcttccttctccagccggcaggccccgccgcttaggagggagagcccacccgcgccaggaggccgaacgcggactcgccacccggcttcagaatggcagaagatgatccatatttgggaaggcctgaacaaatgtttcatttggatccttctttgactcatacaatatttaatccagaagtatttcaaccacagatggcactgccaacagatggcccataccttcaaatattagagcaacctaaacagagaggatttcgtttccgttatgtatgtgaaggcccatcccatggtggactacctggtgcctctagtgaaaagaacaagaagtcttaccctcaggtcaaaatctgcaactatgtgggaccagcaaaggttattgttcagttggtcacaaatggaaaaaatatccacctgcatgcccacagcctggtgggaaaacactgtgaggatgggatctgcactgtaactgctggacccaaggacatggtggtcggcttcgcaaacctgggtatacttcatgtgacaaagaaaaaagtatttgaaacactggaagcacgaatgacagaggcgtgtataaggggctataatcctggactcttggtgcaccctgaccttgcctatttgcaagcagaaggtggaggggaccggcagctgggagatcgggaaaaagagctaatccgccaagcagctctgcagcagaccaaggagatggacctcagcgtggtgcggctcatgtttacagcttttcttccggatagcactggcagcttcacaaggcgcctggaacccgtggtatcagacgccatctatgacagtaaagcccccaatgcatccaacttgaaaattgtaagaatggacaggacagctggatgtgtgactggaggggaggaaatttatcttctttgtgacaaagttcagaaagatgacatccagattcgattttatgaagaggaagaaaatggtggagtctgggaaggatttggagatttttcccccacagatgttcatagacaatttgccattgtcttcaaaactccaaagtataaagatattaatattacaaaaccagcctctgtgtttgtccagcttcggaggaaatctgacttggaaactagtgaaccaaaacctttcctctactatcctgaaatcaaagataaagaagaagtgcagaggaaacgtcagaagctcatgcccaatttttcggatagtttcggcggtggtagtggtgccggagctggaggcggaggcatgtttggtagtggcggtggaggagggggcactggaagtacaggtccagggtatagcttcccacactatggatttcctacttatggtgggattactttccatcctggaactactaaatctaatgctgggatgaagcatggaaccatggacactgaatctaaaaaggaccctgaaggttgtgacaaaagtgatgacaaaaacactgtaaacctctttgggaaagttattgaaaccacagagcaagatcaggagcccagcgaggccaccgttgggaatggtgaggtcactctaacgtatgcaacaggaacaaaagaagagagtgctggagttcaggataacctctttctagagaaggctatgcagcttgcaaagaggcatgccaatgcccttttcgactacgcggtgacaggagacgtgaagatgctgctggccgtccagcgccatctcactgctgtgcaggatgagaatggggacagtgtcttacacttagcaatcatccaccttcattctcaacttgtgagggatctactagaagtcacatctggtttgatttctgatgacattatcaacatgagaaatgatctgtaccagacgcccttgcacttggcagtgatcactaagcaggaagatgtggtggaggatttgctgagggctggggccgacctgagccttctggaccgcttgggtaactctgttttgcacctagctgccaaagaaggacatgataaagttctcagtatcttactcaagcacaaaaaggcagcactacttcttgaccaccccaacggggacggtctgaatgccattcatctagccatgatgagcaatagcctgccatgtttgctgctgctggtggccgctggggctgacgtcaatgctcaggagcagaagtccgggcgcacagcactgcacctggctgtggagcacgacaacatctcattggcaggctgcctgctcctggagggtgatgcccatgtggacagtactacctacgatggaaccacacccctgcatatagcagctgggagagggtccaccaggctggcagctcttctcaaagcagcaggagcagatcccctggtggagaactttgagcctctctatgacctggatgactcttgggaaaatgcaggagaggatgaaggagttgtgcctggaaccacgcctctagatatggccaccagctggcaggtatttgacatattaaatgggaaaccatatgagccagagtttacatctgatgatttactagcacaaggagacatgaaacagctggctgaagatgtgaagctgcagctgtataagttactagaaattcctgatccagacaaaaactgggctactctggcgcagaaattaggtctggggatacttaataatgccttccggctgagtcctgctccttccaaaacacttatggacaactatgaggtctctgggggtacagtcagagagctggtggaggccctgagacaaatgggctacaccgaagcaattgaagtgatccaggcagcctccagcccagtgaagaccacctctcaggcccactcgctgcctctctcgcctgcctccacaaggcagcaaatagacgagctccgagacagtgacagtgtctgcgacacgggcgtggagacatccttccgcaaactcagctttaccgagtctctgaccagtggtgcctcactgctaactctcaacaaaatgccccatgattatgggcaggaaggacctctagaaggcaaaatttagcctgctgacaatttcccacaccgtgtaaaccaaagccctaaaattccactgcgttgtccacaagacagaagctgaagtgcatccaaaggtgctcagagagccggcccgcctgaatcattctcgatttaactcgagaccttttcaacttggcttcctttcttggttcataaatgaattttagtttggttcacttacagatagtatctagcaatcacaacactggctgagcggatgcatctggggatgaggttgcttactaagctttgccagctgctgctggatcacagctgctttctgttgtcattgctgttgtccctctgc

SEQ ID NO: 123 - DNA, 1407 bp, Homo sapiens
tcgtccgcaaagcctgagtcctgtcctttctctctccccggacagcatgagcttcaccactcgctccaccttctccaccaactaccggtccctgggctctgtccaggcgcccagctacggcgcccggccggtcagcagcgcggccagcgtctatgcaggcgctgggggctctggttcccggatctccgtgtcccgctccaccagcttcaggggcggcatggggtccgggggcctggccaccgggatagccgggggtctggcaggaatgggaggcatccagaacgagaaggagaccatgcaaagcctgaacgaccgcctggcctcttacctggacagagtgaggagcctggagaccgagaaccggaggctggagagcaaaatccgggagcacttggagaagaagggaccccaggtcagagactggagccattacttcaagatcatcgaggacctgagggctcagatcttcgcaaatactgtggacaatgcccgcatcgttctgcagattgacaatgcccgtcttgctgctgatgactttagagtcaagtatgagacagagctggccatgcgccagtctgtggagaacgacatccatgggctccgcaaggtcattgatgacaccaatatcacacgactgcagctggagacagagatcgaggctctcaaggaggagctgctcttcatgaagaagaaccacgaagaggaagtaaaaggcctacaagcccagattgccagctctgggttgaccgtggaggtagatgcccccaaatctcaggacctcgccaagatcatggcagacatccgggcccaatatgacgagctggctcggaagaaccgagaggagctagacaagtactggtctcagcagattgaggagagcaccacagtggtcaccacacagtctgctgaggttggagctgctgagacgacgctcacagagctgagacgtacagtccagtccttggagatcgacctggactccatgagaaatctgaaggccagcttggagaacagcctgagggaggtggaggcccgctacgccctacagatggagcagctcaacgggatcctgctgcaccttgagtcagagctggcacagacccgggcagagggacagcgccaggcccaggagtatgaggccctgctgaacatcaaggtcaagctggaggctgagatcgccacctaccgccgcctgctggaagatggcgaggactttaatcttggtgatgccttggacagcagcaactccatgcaaaccatccaaaagaccaccacccgccggatagtggatggcaaagtggtgtctgagaccaatgacaccaaagttctgaggcattaagccagcagaagcagggtaccctttggggagcaggaggccaataaaaagttcagagttcattggatgtc

SEQ ID NO: 124 - DNA, 4530 bp, Homo sapiens
aattctcgagctcgtcgaccggtcgacgagctcgagggtcgacgagctcgagggcgcgcgcccggcccccacccctcgcagcaccccgcgccccgcgccctcccagccgggtccagccggagccatggggccggagccgcagtgagcaccatggagctggcggccttgtgccgctgggggctcctcctcgccctcttgccccccggagccgcgagcacccaagtgtgcaccggcacagacatgaagctgcggctccctgccagtcccgagacccacctggacatgctccgccacctctaccagggctgccaggtggtgcagggaaacctggaactcacctacctgcccaccaatgccagcctgtccttcctgcaggatatccaggaggtgcagggctacgtgctcatcgctcacaaccaagtgaggcaggtcccactgcagaggctgcggattgtgcgaggcacccagctctttgaggacaactatgccctggccgtgctagacaatggagacccgctgaacaataccacccctgtcacaggggcctccccaggaggcctgcgggagctgcagcttcgaagcctcacagagatcttgaaaggaggggtcttgatccagcggaacccccagctctgctaccaggacacgattttgtggaaggacatcttccacaagaacaaccagctggctctcacactgatagacaccaaccgctctcgggcctgccacccctgttctccgatgtgtaagggctcccgctgctggggagagagttctgaggattgtcagagcctgacgcgcactgtctgtgccggtggctgtgcccgctgcaaggggccactgcccactgactgctgccatgagcagtgtgctgccggctgcacgggccccaagcactctgactgcctggcctgcctccacttcaaccacagtggcatctgtgagctgcactgcccagccctggtcacctacaacacagacacgtttgagtccatgcccaatcccgagggccggtatacattcggcgccagctgtgtgactgcctgtccctacaactacctttctacggacgtgggatcctgcaccctcgtctgccccctgcacaaccaagaggtgacagcagaggatggaacacagcggtgtgagaagtgcagcaagccctgtgcccgagtgtgctatggtctgggcatggagcacttgcgagaggtgagggcagttaccagtgccaatatccaggagtttgctggctgcaagaagatctttgggagcctggcatttctgccggagagctttgatggggacccagcctccaacactgccccgctccagccagagcagctccaagtgtttgagactctggaagagatcacaggttacctatacatctcagcatggccggacagcctgcctgacctcagcgtcttccagaacctgcaagtaatccggggacgaattctgcacaatggcgcctactcgctgaccctgcaagggctgggcatcagctggctggggctgcgctcactgagggaactgggcagtggactggccctcatccaccataacacccacctctgcttcgtgcacacggtgccctgggaccagctctttcggaacccgcaccaagctctgctccacactgccaaccggccagaggacgagtgtgtgggcgagggcctggcctgccaccagctgtgcgcccgagggcactgctggggtccagggcccacccagtgtgtcaactgcagccagttccttcggggccaggagtgcgtggaggaatgccgagtactgcaggggctccccagggagtatgtgaatgccaggcactgtttgccgtgccaccctgagtgtcagccccagaatggctcagtgacctgttttggaccggaggctgaccagtgtgtggcctgtgcccactataaggaccctcccttctgcgtggcccgctgccccagcggtgtgaaacctgacctctcctacatgcccatctggaagtttccagatgaggagggcgcatgccagccttgccccatcaactgcacccactcctgtgtggacctggatgacaagggctgccccgccgagcagagagccagccctctgacgtccatcgtctctgcggtggttggcattctgctggtcgtggtcttgggggtggtctttgggatcctcatcaagcgacggcagcagaagatccggaagtacacgatgcggagactgctgcaggaaacggagctggtggagccgctgacacctagcggagcgatgcccaaccaggcgcagatgcggatcctgaaagagacggagctgaggaaggtgaaggtgcttggatctggcgcttttggcacagtctacaagggcatctggatccctgatggggagaatgtgaaaattccagtggccatcaaagtgttgagggaaaacacatcccccaaagccaacaaagaaatcttagacgaagcatacgtgatggctggtgtgggctccccatatgtctcccgccttctgggcatctgcctgacatccacggtgcagctggtgacacagcttatgccctatggctgcctcttagaccatgtccgggaaaaccgcggacgcctgggctcccaggacctgctgaactggtgtatgcagattgccaaggggatgagctacctggaggatgtgcggctcgtacacagggacttggccgctcggaacgtgctggtcaagagtcccaaccatgtcaaaattacagacttcgggctggctcggctgctggacattgacgagacagagtaccatgcagatgggggcaaggtgcccatcaagtggatggcgctggagtccattctccgccggcggttcacccaccagagtgatgtgtggagttatggtgtgactgtgtgggagctgatgacttttggggccaaaccttacgatgggatcccagcccgggagatccctgacctgctggaaaagggggagcggctgccccagccccccatctgcaccattgatgtctacatgatcatggtcaaatgttggatgattgactctgaatgtcggccaagattccgggagttggtgtctgaattctcccgcatggccagggacccccagcgctttgtggtcatccagaatgaggacttgggcccagccagtcccttggacagcaccttctaccgctcactgctggaggacgatgacatgggggacctggtggatgctgaggagtatctggtaccccagcagggcttcttctgtccagaccctgccccgggcgctgggggcatggtccaccacaggcaccgcagctcatctaccaggagtggcggtggggacctgacactagggctggagccctctgaagaggaggcccccaggtctccactggcaccctccgaaggggctggctccgatgtatttgatggtgacctgggaatgggggcagccaaggggctgcaaagcctccccacacatgaccccagccctctacagcggtacagtgaggaccccacagtacccctgccctctgagactgatggctacgttgcccccctgacctgcagcccccagcctgaatatgtgaaccagccagatgttcggccccagcccccttcgccccgagagggccctctgcctgctgcccgacctgctggtgccactctggaaagggccaagactctctccccagggaagaatggggtcgtcaaagacgtttttgcctttgggggtgccgtggagaaccccgagtacttgacaccccagggaggagctgcccctcagccccaccctcctcctgccttcagcccagccttcgacaacctctattactgggaccaggacccaccagagcggggggctccacccagcaccttcaaagggacacctacggcagagaacccagagtacctgggtctggacgtgccagtgtgaaccagaaggccaagtccgcagaagccctgatgtgtcctcagggagcagggaaggcctgacttctgctggcatcaagaggtgggagggccctccgaccacttccaggggaacctgccatgccaggaacctgtcctaaggaaccttccttcctgcttgagttcccagatggctggaaggggtccagcctcgttggaagaggaacagcactggggagtctttgtggattctgaggccctgcccaatgagactctagggtccagtggatgccacagcccagcttggccctttccttccagatcctgggtactgaaagccttagggaagctggcctgagaggggaagcggccctaagggagtgtctaagaacaaaagcgacccattcagagactgtccctgaaacctagtactgccccccatgaggaaggaacagcaatggtgtcagtatccaggctttgtacagagtgcttttctgtttagtttttactttttttgttttgtttttttaaagacgaaataaagacccaggggagaatgggtgttgtatggggaggcaagtgtggggggtccttctccacacccactttgtccatttgcaaatatattttggaaaac

SEQ ID NO: 125 - DNA, 386 bp, Homo sapiens
gatcaagtttcattaaaagaagacattgacatgttgcaaaatgcattagctgaaaatgacacaccctattatgatgtatccagaaatgccaggcatgctgatggagttttcaccagtgacttcagtaaactcttgggtcaactttctgccaaaaagtaccttgagtctcttatgggaaaacgtgttagcagtaacatctcagaagaccctgtaccagtcaaacgtcactcagatgcagtcttcactgacaactatacccgccttagaaaacaaatggctgtaaagaaatatttgaactcaattctgaatggaaagaggagcagtgagggagaatctcccgactttccagaagagttagaaaaatgatgaaaaaacccccccccccc

SEQ ID NO: 126 - DNA, 1217 bp, Homo sapiens
ctgacacctacagcatcaggtacacagcttctcctagcatgacttcgatctgatcagcaaacaagaaaatttgtctcccgtagttctggggcgtgttcaccacctacaaccacagagctgtcatggctgccatctctacttccatccctgtaatttcacagccccagttcacagccatgaatgaaccacagtgcttctacaacgagtccattgccttcttttataaccgaagtggaaagcatcttgccacagaatggaacacagtcagcaagctggtgatgggacttggaatcactgtttgtatcttcatcatgttggccaacctattggtcatggtggcaatctatgtcaaccgccgcttccattttcctatttattacctaatggctaatctggctgctgcagacttctttgctgggttggcctacttctatctcatgttcaacacaggacccaatactcggagactgactgtcagcacatggctccttcgtcagggcctcattgacaccagcctgacggcatctgtggccaacttactggctattgcaatcgagaggcacattacggttttccgcatgcagctccacacacggatgagcaaccggcgggtagtggtggtcattgtggtcatctggactatggccatcgttatgggtgctatacccagtgtgggctggaactgtatctgtgatattgaaaattgttccaacatggcacccctctacagtgactcttacttagtcttctgggccattttcaacttggtgacctttgtggtaatggtggttctctatgctcacatctttggctatgttcgccagaggactatgagaatgtctcggcatagttctggaccccggcggaatcgggataccatgatgagtcttctgaagactgtggtcattgtgcttggggcctttatcatctgctggactcctggattggttttgttacttctagacgtgtgctgtccacagtgcgacgtgctggcctatgagaaattcttccttctccttgctgaattcaactctgccatgaaccccatcatttactcctaccgcgacaaagaaatgagcgccacctttaggcagatcctctgctgccagcgcagtgagaaccccaccggccccacagaaggctcagaccgctcggcttcctccctcaaccacaccatcttggctggagttcacagcaatgatcactctgtggtttag

SEQ ID NO: 127 - DNA, 136328 bp, Homo sapiens
acgaggtcaggagattgagaccatcctggccaacgtggcgaaaccacgtctctactaaaaatacaaaaattagctgggcgtcgtggcgcatgcctgtcatcccagctactcaagcctggcaacagagcgagactctgtcttaaaaaataaaagggggaagaaggagaggggaggtctgcccgagcacagcaaggtttcagccaggtctgccagggcaaaggagggcaggattccacctgcctgtggtcccagggcagagccaggcagccccaccctgaaatagttcttggggtaaaggcctgaaacttccacacgcacttcattatcccagctccatttcctccctctttgccatcatttttctttctccttctttttctccttggaggtcctagtctcctttccccaatatggtcggcccaacacaaactccccacaagcagatgtgggtcaaccttgccctctgaggtcaggttctgctagcatttgggcctgctgagctggacacagaggaagaaaagctcagggaggcctggagtgtagcagctcagtgtcccttgcatcagccccggagaggggcaaggggctgcttgaaggtgcagtcttcctcctgcctggagaggccatatttttcagcagtaggacatacacccctggcaaccctcaggagagtttacagaagccgcgtttaatgctctgaaatcgcagagtgaggaaattattccctgcccacggtgttttcagtccttctgcaaagtcaagaagaaaatacctgctagagctaggaggccatctcctctcccctcctcatcacccctttcacagaggggatgagctctgggtcttcacgatcttttcactttttgctaaagcgtaatagaaattgggttttgccaccatttgtttttatgtttccctttacctttcacttatgg[450 bp omitted]gggcttcatggggaagaggaaagggggccactctcggacagtctgtttcagctcaggggcagaaggcagctgaaattccagagctgctgctccagaaactcctggtagagttagcagggcaaagctacatgcacagagctgaaggcacacaaactccagttcccagagccgaatggctttccctgaaccagtatgaggccacaggctcggaacacatgcctggagatcaaggcagagaggagagcactccctgcccagagtctcgcgacatgtacccagtcctccaaaccagctcgatgccccctcctgactgggtcttcctgggtctcctccatcacaaaatgaaagcacttggctctctggctgcaaggtggacccagactcccctggcccgaattctgtttccataccagtcttcccaaatcccaaaatgtgagagctcgatggggtcaggatctcttgcatctccaggcccctgccccgctctggccagcttggaccctgcactcaacaggggccagcaagtatctggggagcacagtctagtgccccaaaccttctggccatctgattccctggcccaggtggccaggtgccttgacacttgggggcagcttgagacgtgggggtggccttcatgctcgcttatgccctagactaccccagctggttgtgctgaggccatcagcgcctggttgtccagaactctccctggcttccctgagtcctgtttcgggcggtgctctcctgtgattggcctacgcctgctggaccccaagcctcagctttggcgttgaaagtaccaccatcagtggtcccgcctctctggaaggtgaacggttccttcttaagagttggcaagaaataggaaatgggggagttcctgagcttaaggatgggagaggcacctccctcctcacaccctagggacccattggtaaggcacaaagcatgcttcccacattctgtcactccaggaggcttccaggcacagccccagcccctcgaggggctcctgtgtcctctcctagccccagatgctggacctccctggtacctgagtgtagtcttggctaaaagatcctagaaaagtgaccacaaggaaacaaccagaaaggggactgagagggccggacccggctcctccagcaccagtggcaggagatgagggaagggggcctacctgagagggctgccgtcagcaatccagtgatcccgaagaagagccacatgtctggagctgtctctggctgctacgcgtggctgcctgtgggaagcaccatcttggggccgggaggtggacacggccgttgtgcgcccctggcgcaggtctgctctaccctttgctgttcttgttcctgtgtctctctctgctctctcctctccgacacgcatgcgatcaaacccaacctgtgagtgtctcacgcctgcttgttctgcttgtggttttggtctgcaggaagctgggctgctgttacaggggctggtggggagagccccagctgcctgtgctgggagcccacccatccaggctgcaccccaagagtcacggagccagacacacgcatgcacacgcatccatgcagacacacttccccgagggtcttctaagaagaagggaagtggaagagccatgcctcatttctggtggcccagaagaaaaaattgataatgtagtagctgctcaatcagtacatattggaagagggagtgaatgacccattgcctgtcccggtctgtgtaatttggctctcttggattaaatcctgagttttatcttaaccttaggtgcaatggtggttgggaaggagggtgtggtcttgatgcacttttggagataagagcctaagtctcccctcagagaaatataaattgggaagggcctgagagatggccatcccacaagtccttctacagggaagggtgccaaggccttgtgggagccgccccgtcagatggcacagtggggccagctatcccatctccaggtaccagactgggcatgcctccgtgggagtcaggcatgggagctgggtctacaaggctgagcaggattttgacaaacagcaatcatgggaggcctctgggccagaaggaatagcaggagcaaagggctgaaggaaggaagcccagggctgcctgagaaaccccgagttgccccattgcactgcagcagactgacgctataggaagaaggcaggggccaagcgtgtttaattcccatggtactccctgtggagcatatggtaggaggtgaataaatgtttattgaatgagaaaaggaatagataatttggttgtccaagcagggccctggaagtggtcaaatccagaaggggtttggttccaaatcctggccctgcctcagttggtcccatcccaggtccacctctcctggccctccacttcctgcatccttgcttgtcttcatttccccaacatgtggaatgaggagcggtcctcctccattgggttcggtcctaaaggtgggtgtatgcatttgatgcggcaagtattagagccacggggaaccaggcgcccccagagtgagactcctcccagtcctgccccagcgccggcacctgctgccgctgccctctggtggaagtcactggcagcacaggtttgcatgggtgcctcgagctcccagatgcaattccattcatttacacagtcttggtgtgcagaactctggacaggactctgtggaagcgaaagagaggaaaccatattcctgccctcaaggaggatgaagttcacacacacacaagtgaccaaaccacaggccaaggtaggacacacataatgtgaggtctcctggtcctaagaggaacccgtttgaaatgggccgggaaggatggctagactccatttctgacaatatggtagacagcagatgctgaagaattctcctaatacaaaacaccacaaaaatattgtaaaccatcttttaaaatgtgtagctgaggtggtgagaaatgaagaaaatcatcagagatcaaaaacgacaataagcctgggcaacatggtgaaaccctctctctgcaaaaggtgcaaaaaattagccaggtttggtggcacacacctgcggtctcagctactcaggaggctgaggtgggaggatcgcttgagcccaggaggtcaaggctttaataagccaagattgcactgctgtactccagcctgggcaacagagtgagaccttgtatatgttaatatataaagacaacaaaaatccaaagagatcacagccagcagagaagtatctgttgatccagttgaccaagagcttcagtcttatgaacatggacaaaagttaaagctgagaaacaaaatcgaagtgaaaaacaaaatccaaaatttctgccttaaacaaagagcactgaaatacaacatccacagtggagaactcggagagaaaaattccttaaagcgagctgacacagagcttgcccaactcagtatggactctgagtgggagaaaaataaatgtcaaccctgaatgcccctcaccacaagtctacccactaataggcctggaggtgaaactcatggtgactttgtggcaaaaacaaccacacaaaaaacaaacaaacaaaaagataagataagaatttaaagtaaggtaaataatagctccttaggcacgtggcagaaacaaatgataaaaattgtctctggagtaactcatcctatattcatgactcaaagaaatcccacagaaaaactcccatggaacatgagttcacatgtttgtaaaacagaaaaatcataaaacacaggacacaaggtgctttaggtgagaggagcaccaagcaataaactaaaaatgcagaccttcgaacacatctcagatgttggaattgcagtatatataatataaaataaggatgtttcatatgcttcaagaattaaaagttggtaattgaaagtatagataaggaacaagagactatttaaagtgaccaggaagattgagggaaaaaaagcaagcagttatgtaaaaacataatttttgaaaatagaagcccagtgtacagattaaacagtagattaaggctcagcactttgggaagctaaggcagtctgatggcttgaggccaggagttcaagactagcctggctaacacagtgaaaccctgtctctattaaaaatacaaaaattagccaggtgaggtggcacatgcctgtagtcccagctactcaggaggctgtagcacaagaattgcttgaacccaggaggcagagattgcagtgagtcgagattgtgccactgcactccggcctgggtgagagtgagactctgtctcaaaaataaataaataaatacatacataaaaataaacagcagattaatatggctgaagagacaactactggggtgaacaatagatttgaagaatttacccaggatggagcacaggaggacaaagtggtggaaaatatgaaagaggctaagagacatagacaaggaacaaggatttaaatatgtctaattagagttctagaagaaaatggaaaatttctagacttgatgaaagacacaatcctcagattctggaagctcccccaacccaagcatgataaataaaaagaaatctacaccaaacatttttggtagcaaaactgctgatcactagacagaagatggatgaatgatgaagtagatgggcagctaatatgtcaataccaataactaaagccagaaggcgatggaacaacatctcaaagtactaataaaaaaataactgtcaaccttgactatctttcaagtataaggtttaaaagatacattttcagatgaaaattgagagcatttatagctaacagactctcacctaagggaattctaaaggatgttcttcaaaaacaagaaaaataatctcagaaaaaaaagtctaagattcaagtaagaatggtgagcaaagaaatatgtaaacacagaagtggatttaataagcactgatagcataaaataattacaaaaatgtccactttgtggagttagaaaaaaatgaaataggctggacatggtggctcatgcctgtaatcccagcactttgggaggctgaggtggttggatcacttgaggtcatgagtttgagaacagcttggccaaaacggctaaaccccatctctactaaaaatacaaaaattagccaggcgtggtggctcgcatctgtagtcccagctatgcaggaggctgaggcaggagaatcacttgaaactgggaggtggaggttgcagcgagccaagactgcaccactgcactccagcctgggcgacagagcaagactctgtctcaaaaaaaaaaagaaaaaaaaattaaaaaagaaaaaaaaaatgagataaaactaaagaaccataaaacaataacaaattggtgaggagtgatcagagtgggaaaggtctattatttggtgggagggcaaaatattgactagcatttgaccttgttcaattaaacatgcatgttaaactagttgaacaataaaatggaacttgttggggagagaagcctgctgtaaagccaaagagggcaggaaacgaaaagaaagaaatgaaagggagaataggacaaacagaagcgttggtaggtttcagcaggtagctcaggtgtagggtggcgggaagggtgctcttgacagggcacagggtaagtagaggcaagacagcatgatgtgagtgttgctggggctggattgacatgatacaccccaggcagcccatgtttcacagactcgaagtttcaaaaatgaagctgaaaggtgcacccagctgggtgtccaaatcaatgagctcatttttatttagaactcttggagcaggaccttgtgaactcaatttgcaagggacacccagtggctctgcaccctgtggagaactcaggagtttttcatccagactgtatctctcttctgaccttcacccaacaaattggaataagcaacattactgagggaagcccgactctcccaccagaaggaagagaggacctagaactgaaaggccgccaccctcaccatgtggcacgtgggaaagtttaatgctgacgggtacttagtgagcacttcctattgtgccagacactttatatggaaccttaaccctcagttctcattacaactcaaccaagtagaatgtgtccttagcacagccttgcagataatgacactgaagttagagaggtagtttgctcaagatcccacaactaagaagtagtaggggtaggctctgaactcaggtctgtttggatgaagaccctgggctcttaaccacaggggtgggttgtggtacaagcataaaggctttggctgaaacatggcaccacgggcaggaaaggctctggttctacgagactctaaattttggaccagccctgctcctgggccaagccaaacccactccttagtctcttgaatcccgaaatttctcagtcctgaccacagtctccaaaccagctacagccaaaccttgtgtttcctgaggcccagaattttctaccatgttctaaatatttagcatctaaatgtacatacattagctctaatcacttagtcactcattcaacacaactttatctgtgttctaggtgctggggacactacacggaccaaaacagacaaatatccctgtttttacagagcttatattttagtgggagagaaacataatcaacaatagacataataaataggttatatggaaaaaaagaaacagagccgtgtaagagaggctaggagtgtgaacaggggttacaattgtaaatgggtagtagcttaacttagcctcttccccctcaaatggagcctggaacaagggcttgtttgcgacaggttatttgggaatgcgatccgagggaacaggttgaggaacaaagagaagagaaataggaaaagaaggaaagtcaataaaaggatgcctcattgatttggccacactacggacaactagtactcgatctcagacttctgaaatggttctcataactatctgtccatgtgtggtctccattcctaccacccattgcaccagcactgatgtggccaatggagagaagctggctaatgtcctcttgatagtcgtaggcctccctgtggtagagcttctctactggacattaacatacatcgtgtccatccacatgcctctaccccagatatccttgcctctgattttccagtcttgttccttccaggcccctgcccaggagtccatgtatatctatacctccacttgtttccatatacagtccacgaatgaccaaaggtactatcccatctctgcctactgccagtatttccctttaccattgttcttcagagccacctctgagtgaggttatagtatagcttctgtccatttctggctagtaacaaccgattgtgctgccccatttgtgaaccaggtctgaagttttccacttctatcagaaagagctttctcaaggccatagatgtgagttaaaagagaaatatggggccgggcgtgggggttcacacctgtcatcccagcactttgggaggccgaggtgggtggatcatgaggtcaggagttcgagatcagcctcggcaagatggtgaaaccccgtctctactaaaaataaaaaaaaaaaaaaaattagccaggtgtggtggcaggcacctgtaatcccagctacttgggaggctgaggcagagaattgcttgaacccgggaggcagaggttgcagtgagccgagatcacaccactgcactccaacttgggcaacagaacgagactcagtctcaggaaaaaagagagacagagagaaatatggatgcaaaagaggcaggtgccatctgtccatgtaacttacttgtaccttctggttctgtttgggtttgaagcaattgtacagctgctgcccctctccccagatcttatagcctggtgtgtgatggggtcttgtggtcccctagttgttggtgacccatcttcaggcacaagtctctatcagggcccagtagcaccctaggatatgattttcaagtgacaagcatttctctactgcaggagccatggctttggttcagcaccctagaggtttgtgctgcaaaattctcttttttggagccttccagagactccatatggcatccttatccatgtggcatctctgatatgactgaacacgattgtcgtagggcgtcacagcagcttgcaccattgcctggacctgccacagagccttctctcgtgctgggcctccctcggcactagcagcccctcaagtcacatgataaatggtccgacagaattccccaggatgctttaaaatccagaagtacccaccctgtgctgtgccttgttcttactgatgggggatgcaagttacaaaggcttgttctttaccctagagataatgtcccaacatgccccagaccttgggacccttaaaatctttcccaatgtggcagccaccaaaatctttttggagcttatttcttaccttttagcatacagagggcagcagttctcaaattttttggtcagaagacccctttatattcttaaaaattatggaggaccccatagaacttttgttcatgtgggtaatatctactgatatttatcgtattaaaagttaaaactgagaactccggaagatggagagtacaatcatgggtaccagaggctgggaagggtagtggggatgggggagtggggatggttaatgggtacaaaaatatatagaatgaataagatttagtatttgatagcacaacaggataattacagtctacaataatttattgtacatttaaaaacagctaaaagtttataattggatagtttctaacacaaagaaaggataaatgcttgaggtgatggacacaccatttaccctgatgtgattattacacattatatacttgtatcaaaatatctcatgtaggccgggggcagtggctcatgcctgtaatcccagcactttgggaggccgaggcgggtggattgcccaagctcaggggttcaagacaagcctgaccgacatggtgaaaccccatctctactaaaaatacaaaaaaaaaattatccaggcgtaatagtgcgcacctgtaattccagctactcgggaggctgaggcagaagaatcacttgaacctgggaggtggaggttgcagtgagccgaaatagtgccactgcactccagcctgggtgacagtgagactctgtctcaaaaaaaacaaaaaaaaacaaaaaaaactcacatactccataaacgtatgtatacatacacacacctactatatacccataaaaattaaaaattaaaaaagtttaaacaaaaaactgagacatttaaaatatttatttaatacattttaaaatataaacagcaaactcattacatgtcaatataagtaacactttctgtgaaaaattactgtatatcccaaaccccacaaaattattgggggccgggcatggtggctcactcctgtaatcccaacaatttgggaggtcgaggggagctgatcacctgaggtcaggagttcaagaccagcctggccaatatggtgaaaccccttccctactaaaaatacaaaaattagccaggtgtggtggtgggtgcctgtaatcccacctacttgggaggctgaggcaggagaatggcttgaacccaagctgcagaagttgcggtgagccgagatggtgccagtgcactctagcctgggtgacagagcgaggctccgtctaaaaaaataaaataaaattattgggatattattgttttatatttttgcaaatgtcttgaacatccagctttgtagaagccacctggattttcatatctgcttcttcatttaatttgtggagatatgttatttagattgaagtatatgggaaaaaatctggtctcacaatatggagtagataaaaggaggagtattttaataggattttaaaaataattgtagatattcttttctgatattgaaaagttggcaagtgatagtttccaaaggttagctccaatgtgaaatctgaaatcatatcaaagaccttttatatatttttcaagtccattgttctatcttgtactttgaatggatctcttatccgtgcatgattttgtaaaaatatgtctcagtcattgtggaacatactgttctacagtccatttttaaaatccattgttctatcttgtactttgaatggatctcttatccaggcatgattttgtaataacatgcctcagttattgtagaacatactggttcacagatgcagaagttattcagatcttccaaatgttgacatatttcgttacacagtatcaaaaatcacattcattgatatcatctctgatcccatcagagaactttgagtattggaaagatgtcaagatcatgacacgggttttctaacatttgaatttttacttaaaagctctgatttcatcaatggcaacaaatactgtctttttctttcaagtgacaggctcactttgttcattttcaaacaattgtctgccaaatttttaagtctgaataaccatagtttcaagtaaaaatggtgttccatgggggaaaacgtctagttcagctggcaaatccaaaaatagcacaagtgctttttttcccagagctaccttcatactgtagtattcagcaggagtgctttttgcttacttcttatttgtcacatagaataaagattgtgctttaataatattaataattttaactgcttcattgaggacattcttaaataaaagaacgcatcctctgaatgcatcaggatgaaaaactccaacagctactactgcagcttgatgccactgctatttttttttttttttttttttttttttttggcaaggtgtcactctgtagcccagtctggagtgcagtggcgtgatcttggctcactgaaacctccacctcccaggttttaatgattctcctgcctcagctttctgagaagctgggattacaggcacgtgcaaccatgcctggctaatttttgtatatttagtagagacagagtttagccatgttggccagactgatctcaaactcctggcctcaaatgaactgcctgccacagcctcccaaagtgttgggattacaggcgtgagccaccgtgcccagcctggcgccaaggctttgattcatgtgaaggcacaagtggttttactcatcattgcttttgctccaggcaaattatgtcagtgaaaaaggcaaattgtatctttatgtttatatgcaaataattttgaactcgtggaccactgaaagggtttcagggatccttaggggttcatgaacctcactttgagaagggagagaagaaccatggtgctcagagctgaaacttagcatcttgaatatccgacctagttcttctcctaagcattacttgagacacgtaagctctcttcaaggggcagcccagctctctgttcccccttatgtataggattccaaggtgcctgatcagtttccattgaagtgtggtgtccactgaacccaacactctatgaaggaactaatcagtctggggtctagcagagtgaggtccctgataccaaatttaacctttattataacaatcaaagcctccgaactacattagaggaattctggaaaattaggaaaagaaaaaaagtcacctatagtcacactaccttgacaaccactgtcatgctgtagcctagggtggcctaaaggttgactcatcctgaacttcttgttgttgaaaaaatcccagggctatttttttgtcttgatgctgctaagccacatcattctggccctttccagttgggtcttaggttcccaagagggggacctgatattcagatctatccacttcattcatatagagctcccctgtcagtggtccagaacccattgcccaattggactaacccttctagcttcatgtgatctgcacatagaatgcatccatgtcaatggctctttcctaaattccctgttgaggcttagaaaatgataccccaaataaagtcctccacagtagcctcagaagcaaccatttttctctaaccttctgccctcaagtctctcagtcccatgctcccccaagattagccatagaaactggaatccctcttctccaaggcaggtagaaacagaacccttttcccccaaagtcagccataaaacctaattatattactctactctaagtttccctccacctttctgtataaaaactggccataaagaaattttcttggtttcggctttgtttgactctgtgtaggttgtaagactcccattccagagagagccccgtcctacccccagaaggaaggaatgcagcacagagaggccaaaaagaatctagaacctgggataccaagaagaatctagaacccaggatacctagaagaatctagccagacaggccttgtttgactgtatgtaggtcataagactcccattccagcgagagtcctgtcctacacccagaaggaaggaatgcagcacagagaggccaggaagaatctagacagacgggccttgctaggtttccccactcagtccgttagcattagatcatacccttagggagcctggatagctcagtcggtagagcattagatcatacgctttttgttcaattctgtatctacacggctgtccacactttgctgaacctaagcatcaaagtggacaagttccctcgtctctttgggtattcactctgtaggctcccatgtacacacattaaatacatctgtatgctttttctcctatttatatgcctcttctctgagatttttcagtgaaacttcagagggcaaaagggaagtttccccttggtgcccccacaccccatgggaatcttggattatagctcttgatggtgaaaccaccggcactgatgatgcatcccttctgtattagttttctaggctgctgtaacaaattactacagacacggtggtttaaaacatcagaaatgtcttctctcacaattctggaggctggaagtctaaaatgaaggtgttgacagggctgctttccctcaagagtcactaggggagaatctgttcctgccctcttttacctcctggtggcagtgggagttccctggcatcccttggcttgtggcttctcttctatgagggtctatccaatctcactctgcctttctcttgttcgggcacttgatattttaattttttcccaaacctcttgtgtcacttcatagggcatttctgacagctgttagggtccatctcaatagtcaagaataagctcccttcttcaagatctttaatttaagcaaatatttcaccctacgaggtaatattcacaggtttcagggattaggatgtggacatatactttcatgggggaggcaccattcagcagacatttatttgtagcagcagttttcagcgaggaataattttgcccccaggggatgtttggtaatgtctaagacatttttcagttgtcacaactgtgggggatggagtgcagcaagcatctgtgaatagaggccaggaacgctgttgaacacgctacagttcacagcacagctccccacagcaaagaagtatctagtccagagtgccagtggtgtcgatgttgagaaattctgacttacagtaaattagtattatagtatacactatccgaaaagcaactgctgtcatccctgtctctaactctttttcattatcgcctttattacgtatgacattaaatctattctatcccatatttatttgcttgttgtctctttcccatcccaagggcagagatgtttgtctgtttcattcactgttgtgtcctcagcaccttgaatagcactcagcacattgtgagcattctcaatatttactcaatttattagttaataacggtgcagatatttcctctctctctctctctctttctctctctctgtctgtctgtctccagggtcttgctgtgtcacccgggctgaaatgcaatggcacaatcatggctcaatgcagccttgaccacctaggctcaagagatcctcccacctcagcctcctgcctggctaatttttaaattttttatagagatggagtttttattttatcttattttttgagatggagtctcgttctgtcacccaggctggagtgcagtggcacaatctcagctcactgcaacctccacctcctggattcaagcgattctcctgtctcagcctccccagtagctgggattacagatacacgccaccacacccggctaatttttgtatttttagtagagacagggtttcaccatatttgtcagactggtctcgaactcctgacctcaggtgatccaccctcctcggcctcccaaagtgctgggattacaggcgtgagctaccgcaccgcaccaggcctgagttggagtgttgccaatttgcccaggccaatctcgatctcctgggctcaagcgatcctctcgccttcatctcccaaagctctggggttataggcatgagctaccacgcctggcaggtacagacatttcttgagcccttactctatgccagccaccatgctgggttattatctctttttgatactcaccaaaacccctctacgttaagtataatttttctcctccatttctcagataaagaaactgaagaggttaagttattgctgaagatcacacagctcttaagaggtcaaaccagggccctttctctggtgacccaactccagagtattcccttggagaggatgtgacttctaggtaccaggcatggtgccaggcactgaaacagagaggaagaaaacacgagccctgtcttcaaaaagtcactagtccagtgagagaaacaggcaagtaagcaggctcgtgtgacatgagttgccgcgagggatgatgagggagaactgttataggctggatgtttgtcccctcaatctcatgctgaaatgtaatccctagttttggaggtggggtctgacaggaggtgattggatcgttgtggcagatccttatgaatggctcatcaccatccccatcccttatggtaatagggagttcttgctctgttagtttatgggagatctggttgtttaaaagactctggggtctcccccttctctctcttgttctctttgtcgccatgtgacatgctggctcccctttgccttccatcatgattgcaagcttcctgaggcctcaccagaagcagatgctggcactatgcttcttatgcagcctgcagaaccatgagccaattaaacctcttttctttttcttcttcttcttcttctttttttttttttttgagacagagttttgctctgtctcccaggctggagtgcagtagcacaatcttggctcactgtaacttccacctcccaggttcaagcagttctcctgcctcagtctcctgagtagctgggattacaggtgcccgccaccacacccggctagtttttgtatttttagtagagatggggtttcaccatgttggccaggctggttgtgaactcctgacctagtgatctacccgcttcggcctcccaaagtgctgagatcacaggcatgagccaccacgcccagcacctcttttcttttctttataattactcagcctcaagtatttctttacggccatgcaagaacagactaacccaggatcccagccttgaaaaatcaggggagactactcagaagaggttacatctgggtcaagtcctgagggatcagtattcatgagtcatagaaagttctaggctagaggagcagcatgtgccaagttccagatgaaaggcggctggaagctgaccatggctgaaggcagggtgggagcaggagacatggagagagagcagtcagagatgaacttgggagttggtccggaaggggttaatcctggagggcctgcaaagttggacaaagaagttgagactttgtcctagagaatccagaaccagagggtgccctttcagggtttcaagcacgctggcttcagtgctgaacgtgaaccgaaaggtcctactgcagtggttcaggaagggaatgctggctgcccaaacaggggcagtgttgtgggggtgagagagagatgggtggacacaaaacagaatgaccaggcaacatcaatggaacttaggggcaggacccttggggatatctgcaacagggggcaggcatgactgcaatccattttctaaaaggtgggtgagaatgaacacttaataaaatgatgtaagaagaaaaaactatctttggcaaaatgttgcctccccctccagatcccagtctgtggatggcctcactcctcctgggtgctaagggacagggaagacaatatgagggtgtatcctctactgtcatcctccccactgggggccatggccttccacaagccagtccacagtctatgtctcatcctaagctgtggccctgggaatgtgctgctgattcattctggccccatcggcttggaaaggtgtctgctctgtcctactcctttcaaggcaccgggctgtccttgtagtcatggggatggggccaaacatcagttctcaaccttgtcctgccacaagtaaatgatattccacgggcagccacttgtctccattgggaatgggaatgatgtgtggacaattcagcggtaggttacctgcaattcctggtgcacctgctacacaccagggcatgctgggactgaccaccctggagtgagcaggatgttaggattggtcactgcagcataagaagctgctgtggatgaatgcctgcatagcagtcaaaaaattccccagactgtcactgtccttccctctactttgcctctcctcaatctgtggctattatgcttttatccaggtggctcaattttttaattttcacctattgtcaagcccaggatcaccctacaggtgtagagagtgggttggccaggtataagagaaatctaaattgttctgaaggtgtgaggcaggccttggctagatctgggggataaccttgcctcaactgcaggggccacctcttggtcctgcttgcacagtcttgatgaggctgtgtgtatttgatgctcacctgtgaactataaaacctgtgggcaacacagcaggatggtgccagtgcattactaagaaattgtacctggagagtgaaagttggatcaaggtttcattgcttcatttttttcaaccacataaagtaattgtgctgggttttaaaaggtagagctgggggcctaagtggttagtcaagtcctacttttgaacttcctaaaatctgacgtctctcaccctgccctggcagagtgccatcaggagaatctaggagactcgagaagccacttcacctaacatcctcattgtgatctctctaagaaagctcgctgatgacgcagcccctgtgcttctcacactcaacagtagctgtgttagatgcacaggtaaaaaggctcattttcaccagcctccaaccaaggcatctgcagggacacttcagcatgtcaccacaccagacagtgttgctgcccttggctctctgtgagcatgcaggcccagagatgccagatcctctgcaatttcaggagtagccaaaagtccggatcttcatgctaatacttctgattttttttttttttttgagatagagtttcgctcttgtcgtccaggctggagtgcaatggtgcgatctgggctcactgcaacctccgcctcctgggttcaagcgattctcttgccttagcctcctgagtagctgggattacaggcctgtgccaccacgcccggctaattttgtgttttcagtagagatggggtttctccatgttggtcaggctggtctcgaattcccgacctcaggcgatctacccacctcggcctccgaaagtgctgggattacaggcgtgttccaccgtgcccggccaatacttctgaatttttaaggagataactaaaacttcaaaaatgttttaaaattaaaaaacaatatggccgggcacggtggctcatgcctataatcccagcactctgggaggccgaggtaggtggatcacttgaggtcaggagtttgaggccagcctggccaccatggcgaaaccccttctctactaaaaatacaaaaattagctgggcacggtggcgggcacctgtagtcccagctactcgggaggctgaggcacgagaatctcttgaacccaggattcggaggttgcagtgagccgaggtcaccccactgcactccagcctccagcctgggtgacacagtgagactccatctcaaaaaaaaataaaaataaaaaaataaaaagagaaacagtaacagaagctacaacaaaaactaaacaccatgtaactaaacactatcagagccaaaccacatagacctgtgggtcacggccatggcccaccagctctggggctcctcagttctaagattctgctctccagctccctcccactggtcatcagtgttgtgactcgtgccctgggtgacagtcatgtccgcttttggaacattacttcccctatctgcaagaggcaagtcacccctaccttctccccagctaaatgtgtccccaggactttccccagtgaaccagcccagcacctggccccctggtaccttggagatggaggctgggcagtaagaaagacgctgggctgggtgcggtagctcacacctgtaatcccagcacttttgaaggccaaggcggatggattacctgaggtcaggcatttgagaccagcctggctgacatggtgaaaccccatctccactaaaaaacacaaaaattagccgggcgtggtggcacacgcctgtaatcccagctactcaggaggctgaggcaggagaattgcttgagcctgggaggcagaggttgcagtgagccgagatcgtgccactgcactcccggctggccaacagagtgtgactctgtctcaaaaaaaaaaaaaaaaaaaaaaaaaagatgctgcactcctcttttctttgctactttcctctcctgggtttttctctgcaggccacactgcttttagaagcctttcccttcatctaccacccgctgaacatcaccgatggcaggccagcactctctcagctctctgggtaagactcagctctctgggctaagtctgagctcatctgccagcctagtgatcttgccaagagaggaaggagctggatctgatgtgatctgaacttcgtcaccataccgtcacagctgatgacctaagcttcctccaagtcgagggatggtgcagctccattgaagtctcctcttctctcctccaggctctgcccacctcacgagagcacatggtcctgactgcagtgactgcaggaagacctgggatggagggctctgctttctcaccatcctcttggcctggcttctctaacatgttaaaaacttacagtggcccacaactgtaatcccaggactttgggaggccgaagcaggtggatcatgaggtcaggagtttgagactagcctgaccaacatggtgaaatcccatctctactgaaaatacaaaaattagccaggcgtgatggcacgcgcttgtaatcccagctactcagaaggctgaggcaggagaattgcttgaactcaggaagtggaggttgcagtgagccgagattgtgccactgcatggcagcctgggcgacagagtgagacttcgtctcaaaacaaacatacaaacaaacaacaacaacaaaaaatccctcgcttttttgctggtatctatagtgctttttttgctggtatctatagcttttgtgagactcagtttatttagctttagctttcctgatattattattcttacaaattttgccttgggacactctttccattcattgattcaggcaatacttattgagcacctactatttgccaagcactgggaagccattgagaataaaacagtgaagagttagaaaaggtctctgatctgatggagggcctattctactggtgctaactgaacaagtaatatgtgctctgaagacattaaaacaagacaatgtgatgggggatgctgagaatccagtaggaaactacttagatgggaaaatcagggaaggtccctacaaaggagacatatatgctgaaacctcaataaagagaagcagccagccatgcaaggatatggagggagagcagttatggcagaggggtcagcaaagacaaaggccctgaggcagggaggagcttagcatggaaggggaacctgggaggccggctggctggacttgagtgaacatggggctgagatgagatcagaggagagcagaggccagatcccccgggctcctaggtcagggtggggctggtgcttaggagttctgaggctgactctgatttagtctgaggtcggtgtccctctcaatcccgactcacttgtggtcctctatggcccgcaggcttgttgaaagtgccccacttccttcctcacagcagcctctgtgcaatccgaattgcgctgtgaatttccctgccactcaggagcccggggcagggcttcacccctagttcagttaccaggaaccaatctttctccaccttcctgccctagccccactgggtctgtctctgcatctgtgaaatggctgagtgtgaccaaatgatgcaggtagcctttccacttctttctacccgtggcgcctcgggtggaggcgtggagtttgattggaagagggtaaagcaaaagtggaatcctggcgagaaatgaaactgaaagaaaaaattcctcctggaattttttggctctaaggaggccagcagcgggggtttggggtaggaggcagaggtagagaaggagggaggtttttagaaagctgaccgggcaggagccctgtgacccaggctttcacttctcctaaacacccagtagcgccatgtgatgcaggcaggggactgcggatagggcctgtgaaaggggaagcgaggggagcccagagtttctcaagaagccgagagagggacagaggctgagcctggggggagggctgcaggggactgagaggggagtgtaggcagtgggggtgagggggacagggaggaggtggagaagacggcaaggggcagcagggtgactggggcagagggagcccccaccccacgcccagggcaggccaggagtcataaggagaggggacaacaggaaggggcgacaaacggggaggggaaagggaggcggaggggcagcgaagtgaagcagggagggtcgcagtgtgaacaagagtgcgaggaagggtcaaggtggagggaggagaggggagagttagggagaaacagctgcaggagaggcgcggggaggaagccttaggggtgggggaagggagaggggagttgagaattagggaggaggtggtagagtccgggtagtgagcggagggacaggaagggtagggcaagaaagggagaggggacaggagggaagggtgggccaaagcggtgagaaaggagggccagccagttgggtgggggagagggccgaggcccgggggcaggagtgcagggctctgaggcggggagaggagaggagagaagagccgcggggggcccagcccggagccaggatgcccgcgccgcgcgcccgggagcagccccgcgtgcccggggagcgccagccgctgctgcctcgcggtgcgcggggccctcgacggtggcggcgggcggcgggcgcggccgtgctgctggtggagatgctggagcgcgccgccttcttcggcgtcaccgccaacctcgtgctgtacctcaacagcaccaacttcaactggaccggcgagcaggcgacgcgcgccgcgctggtattcctgggcgcctcctacctgctggcgcccgtgggcggctggctggccgacgtgtacctgggccgctaccgcgcggtcgcgctcagcctgctgctctacctggccgcctcgggcctgctgcccgccaccgccttccccgacggccgcagctccttctgcggagagatgcccgcgtcgccgctgggacctgcctgcccctcggccggctgcccgcgctcctcgcccagcccctactgcgcgcccgtcctctacgcgggcctgctgctactcggcctggccgccagctccgtccggagcaacctcacctccttcggtgccgaccaggtgagtggcaggaggcctgccccggcatactccggcgggtgtggagggaaggagggctggcccccagcgtgacctgggacaaaccaggtcccctgcctgcactagtttcctgatttgaaagaagaggggggctagcccttgcaaaaccgatggcaaccgcagtgggaataaccatggttgtttttttgtttgttttattttttgagacggagtttcactctgtcgcccaggctgcagtgcaatggcgcgatctcagcgcactgcaacctcagcctcccgggttcaagcgattatccctccttagcctccagagtagctgggattacaggggcctgccaccacgcccaactaatttttgtaattttttttttttttaagtagaggtggggtttcaccatgttggtcttgaactcctgacctcaggtgatccacctgcctaggcctcccaaagtgctgggattacaggcatgagccaccacgccaggcaggttggtcttttttgagctacttgcaggccctatgctaagcactttcactgtttaactgatttaatactcttcaccacccaggaagtaggaattattatgcccattttacagagaaagacactgagaggtttcatggcattaatcaacttgcccaaggtgacatggagggtcgaggagccgagtaaaggcagctggactccaggtcccaccatgaacctcctctctgtgtgttatggggatgtgcgggcagggcaggagcaagccagcttcttcctaccagcagtgctagaggctgtcaggccgacttgctcagatcccagctctgcctttcactagctggagccacatgggcaagaactcatttatatcctgaatgggctgcctggtcttctcccttagctcaacctctgagcctttctccgttcccccttgaacagagcatggcacgtagaagaaatttaataagtatttgctaaatgaatgagtaaatgcccaacaacacggctatattttgatagctgttcccagtgggatattagacaataatttagactaaaatgtaatattattaaaataaccacatatggtgtaaatgagcaaaagcaggaggcaggactgcatacagataggactgcagccatgtggaaagacgaggtgtcaacgaaaggaaactggaaaaagattgtcacagtggtatgatcaggccactggactaattgcactttcttcttgtctcagtttatcaaatgttctttgattgcacatattatactcataaaggggacatttttcaaaaggatcgtttcatccaattggcacccacaattcagcacctagcagtttccagtgtccttgacaaggagtcacttgtccagcttgtttaggatcctttgatgatgacttcatgcccccaggccagccctggccatctcttttcttttcttttcttttctttctttctttctttctttctttctttctttctttctttctttctttctttctttctttctttctttccttctttctttctttcttcctttctttctctttctctctctctctttctttctctttctttctttctttccttctttctttctttcttcctttctttctctttctctctctctctttctttctctttctttccttctttcctttctttcttcctttcttttgacggagtctcgctctgttgcctacgctggagtgcagaggtgcgatctcagatcactgcaacctccacctcccgggctcaagcaattctccctgcctcagcctcccaagtagctgggattataggtgcccgctaccacgctggctagtttttgtatttttttaggagagatgtggtttcgccatgttggccaggctggtcttgactcctgacctcaggtgatccacctgcctcagcctcccaaagtgctgggattacaggcgtgagccactgcgaccggccagccctgaccgtttcttacttcttgttgacattctttctgacctagagacccccaatatttgtcaatgggaatctctcatcttcctttaatcctattatttcattgacatcccactagcacccccaacccagtacccttaacctgtgtcattgaccctattgacctccagagagcctcacccatctagtaccccctgtggcaaaactgatcttctggaggccaggccactgagcagagcctcccgtggcatcaacagggccagaagctcctgtacgttctccccttggctgggcacgaactttgggtggagcaaaggcaggccacaaggcctcatgaagtcgggacctgatccctaggacagtgcagaaacaccaaaatgatttgaggcaggaatggacatcactggatttgagctcttcaaaaatggctccggctgcagtgtagacagcatatgggttaacaagagtgggtacttcacaacaggcaggaagcggctgcagaattcaggggggcagtcagatggggatgtgggggtgggtgggactggcaccatctggcaacagctataccccaggagctgcgtgtttcacatacttgctgatttcagaaagggccatccatcactctcgacaaagcatctgctcattctaaaagaactcatttatatcctgaatgggctgcctggtcttcccccttagagttacaatagtcacattcatttacttccaattaataaatggaagtggctgcttctaatgggacctattcaattttctgcttgaaagtctagagcgagaattatcagtgagctgatatgcccctccctccccacttccaggaggaccccgcagaatctccaatggaatgcgggtttaagtgcatctgtgtggactataattttacatttgaaaaaggaaaaataaatacttgtcttttccccaatgcaactacagaaagtaaagtttgacaaaatcgccctagctagtggaaatataaatctctacttgaaaggcagtaatggatcctgagatttgcaggggcatggaaagggtgactggtttagcaatgtagagaagtatttattctctccattgaaatggcccctagtcctcactgctttttttttaaatgcagatgcccaggtcctgccccagacctgctgagtcagaatctgggacctgggcctgggagatttggaagcagctagtgcagctgactggagccaacagaccagaaggggcctggggcctggctgttgctgattgatccaaattctgggtaaagattttcagcccatctgcccttgctgggaggcctgaaaaaaaacgtttttttcaccaggccagaactcactcttggggctgtgcctgggaccacctctgctgtatatcagagggacaaaagtggggtgaaaggatgggtcacagtaggcttctctgcttgcctctccgaactgcagaggaaattctcgctcagacttctgttctttcggtaacatgcatacaacatttttaataatgtgcaataaaactgagatcttattggcttttttctgattataaaagtaatgaataggccgggcgcgatggctcacgcctgtaatcccagaactttgggaggccgaggcgagcggatcacgaggtcaggagatcgagaccatcctggctaacaaggtgaaaccccgtctctactaaaaatacaaaaaattagccaggtgtggtggcaggtgcctgtagtcccagctactcaggaggctgaggcaggagaatggcatgaacccggaaggtggagcttgcagtgagccgagattgtgccactgcactccagcctgggcaacagagcaagactgtctcaaaaaaaaaaaataatgaatagtgtaggttgctcagtgaaaaacaaagggataaatcaaccagaaatgaacaagtggcatctgagacatctgttgtatgtgttcctctgcgacaataaaaaagcagtgtgtgtcatgggtatgcaaaagcagctgggccaaatgtcctgatctttagcaagtgactcccaagagaaggattcattcattcactcagcaaatatttactgagcatctgtttgtgatcagagactgggaaagtgtcggaacgcccaccacccactgacccaagaagtgtctctgtaggagggaggggtatgggtacagagagtgccccggacccctttggccctcactgtcaccccttcctgaatggcaggtgatggatctcggccgcgacgccacccgccgcttcttcaactggttttactggagcatcaacctgggtgctgtgctgtcgctgctggtggtggcgtttattcagcagaacatcagcttcctgctgggctacagcatccctgtgggctgtgtgggcctggcatttttcatcttcctctttgccacccccgtcttcatcaccaagcccccgatgggcagccaagtgtcctctatgcttaagctcgctctccaaaactgctgcccccagctgtggcaacgacactcggccaggtaaggaggggctctgggtgcagggagcctccaagcctggagaagcgctggatcgctcccggggaggcatggtccaggttgcagacattctggttcagctacagtgatagctttttatgatgatctgctctccagtgggccagagctgcccgctgtgactgaggatggaggtcaaggtagtggtggtagtggtggtggtattattggttgccatctacgtacagaatgtgtgaggatggggctgggggcggtggctatccctctaattccagcactttgggaggctgaagctggtggcttgcttgagcctgggagttcgagaccagcctgggcaacatggtgaaacctcatctctacaaaaaaatacaaaaattagtggggtgtggtggcctgtgcctgtggtctcagctacttgggaggctgacatagaaggatcaatcgagtccaggaggttgaggctggagtgagccatgatggtgccactgcactccagcctgggtgacagaacaggaaaaaaataaaaaaagaaaaatgaaaaaaaaggaagtgtgaggatgatcagggtcttgacagtgaagatggtagtaaggataaggatgatggtgttggtatctacactgaagacacaaacattggcaatgcggaagacagtggcattaaaggagaggatgatggggatgatgtttccaatgaaggctgttaggatacaatgtaaataattccacattaccctgttactaaccatcacagcgtcttaggaaatcggccaaactcgctccctcctcattagctgacatccaaaggaggaaggttctgaatgaccttgcataggtcccatggcttccttttgcccctcgccttcctaaattaactgtctacttatgccaagcaaatctgtctccagaccttgcagccagttacagctcttgtcaataggatctaaatgaaaaaggtgaagaacatgctttccccagtctggcatattgctagaggtttgtaagttgtcaggagccgagaagtgtggtggttttcattatctatcgctgcctaacaaaccacaccagagcttagtgatttaaatgacctttttatctcctctcccagttctgagtgactgggctcagtcgggccgttctgcttctcgtgatggcactggggttgcagtcatttgggacctggaaagggctagaacttctgagtctgctcacttacatggctggcagtcaatgtgggctgttggctgtgagctcagatgggactgtgtggaccagagcaccttggttcccattcgtgtggtcttaccatgtggcttgaacttctcacagcgtcgtatgagggttccaagaggagggagctttccaagaatgaatgttccggggaggaagaaagcagaagttatgggtcttcttaaggtccttaagaggcgttgaagtcccagaccaccacttctgcttcattctaacaggtcaaagctgtcacaaggccagcagggaaacaatggcagtgaaagtaaactccacctgttggtggcaaaatggcagcacacgctgggaagggtggagttgacagtggctgtctttggagatgactacactaatattgtcccttttggaatctcaaaggacagtgcaaggctcttggacaaaaagaggtcagaaagctctcaggacaaagggcaaagggcaaagggtaaaggctgcagcagtgattgatcaatcttgtcgcctactgatattccctctacccccacctctccactctctatgccttgtcatggagggagagggttgccatgttgactgttgaggaggatggacttgagacagcaaggggggggaattttggtgtatcaaatctgtgacagcgtctctctctgagtcaggcttggactgggactcccctggttcccgtggcaaattgatgctacgagccaaaaaatcccttcagactgttttccacagtctctggtcttacttccctcaggactcagaggggccacagctctagagcggaatgagtcttggctaggcacttttgcagcaaaagagaggatagaataatattggcagtagtggtgccaacattgaaaaagagtgatggtgatgtgaatggaaactccgtggagaggacgattttgctgacagcagtcaccttactaaaggtgatgatagtaaggatgctggccttggcgatggtggtgatgatggcgaaggtggtgctaacagcggggtggaggagatgagggtactgatttcagagacgtgctgatactgggaggaggattaaattagggggtgatggtagaagtgaaaacgttggctgaggtggtggggaagattatggctgctgcgtttgtttgtttgcttgttttttgagagggagtctggctctgttgcccaggctggagtgcagtggcacagtcttggctcactgcaacatccgtctcccaggttcaagcaattctcctgtctcagcctcccaaataactgggactacaggtgcacgccaaaacagcctggctaatttttgtatttttagtagggacggagtttcatcatcttggccaggctggtcttgaactcctgacctcaggtgatccacccgcctcagcctcccaaagtgctgggattacaggcataagccaccaagcccagccttgactgttgttttatctgctgcctctggggtctcacagagaccgtcaatgtgcccgcgtgctggccgacgagaggtctccccagccaggggcttccccgcaagaggacatcgccaacttccaggtgctggtgaagatcttgcccgtcatggtgaccctggtgccctactggatggtctacttccaggtgagcatacctgccctttttctctgggggcctggctccccactcaccatctgaatggcctcatttctcatcacagaggcccagggcatgtggaaagggggaaagtctgggaataaagtgaggtgctgccccgtaccagctagcatggggcctggcacaaagccgtctcagcaatccgactccctcggtggtacggcaagaggaactctggagacagcttcctcctgctatacctcctgcgggagttgaattactgggatggctttgtgccaggctaggtccttgaataagtcacctcatctctctgggcctgtttcctcatgtgtacaatgggtggcttaaacgagaggcttttccagctctgctgcattcagattgtccgacttggtagctgaggcctagagagggtgtgtcagttgcccaaggccccacggcaggcaggtcaggggcaagctcacaaaagtgagtactttgcaacagtggttccccagcctggctgtgcttcagaatcaccggcagagcttttaaaaatatgctgttttaaaaacagattccaagtccaaccacaggctattgaatcagaattgctggggaagtttctagtttaagaaacttttcagatgatacagatactcagagttgagaactattgtcttccactcaccatattactcctcagtggggaggttagtgatgtgtttgtgtgtgtgtgtgtgtgtgtgtgtgtgtgtgtgataggagggtgggcagcagcttaatgctagcccccaggccataaggtcattgccttccatacccccttcacaggaacatttgttggagctcccagcctgctacttaggggcacacagtatttctatgatgagatggcggcatgtggtgggagggtgtccatggctgattctcagtcataccaatcagatactgacttccttccataccagttggtaaatggctgctgccctgagcagtccacatgctctcccctgccccagcccttcctgtgggagtctcctggatcctactccattatatagcaactaaaggggcagtgcgtggtattggaggtggcccctgggccctgctcctgcagctgtgtccagagccattctggcaagtccatgtctatgcagtgcttgtgtcaacctgtggactcagcttggcttcagtgtcagatgagaactccctgtgggggcagccattatctttcccatttcagcaaacatttatccatgcttaccctgtgctgggccctggggacacaaatactagtcagaccagctgtgcctgggctctgggataaggctgcacgcactgcctacaggcctgagagcagagcacaggaagctccctgcccagcccagctacctaggagaaaggagggtgggaaggtgactatctccctgagactgggagaggggacagctgcccagctgtcctgtggtacggcgctgaggaatgccacctaggagttgggagggggcatggccgtttctgttccagcctcacccctgtctctcttggcagatgcagtccacctatgtcctgcagggtcttcacctccacatcccaaacattttcccagccaacccggccaacatctctgtggccctgagagcccagggcagcagctacacggtgagagataaagcatgtgttcggcacccagttcagccaggtagcggcttcctctgagaagaggaggaaatgaaactgccttcacactcccctttcctgcctgcaaggcaacctcaggatacaggaaaagcacctggagggtgggaggacttgtgtcacagcgcagggatcctgccaagatgctcaactgcttgaaggaattcaggccagctgcacacccccatgctgctgctctgaagcaggtctcgctgcctaatttgcaccctcagatcaagcatacttaggtcccttttcaactcttccttgtcccctctttctctgggacccttagatacctagatctctgcctttcccagaactttctaaaccagttccttggcatttcagactcatgaaatgaatgatctgcagagctggcagatatatgagaaatttgccattgtagtccatttccttgcccatggcagacatcactagtcaatcatgactttttttatgctgagcccataaatgttccataatcagccactaccaattgataaaagttagaatacaagaggaacctatttgccatctctacataatcccactccctggttacacagctgaggagcatgaactccagagagggaaaggagctggaccccagggtcacccagggccagtctagagtccaggtctcctgactgcagccaggctccttgcactctgctagcctgcctctcctgacttcctcctgcccagatcccggaagcctggctcctcctggccaatgttgtggtggtgctgattctggtccctctgaaggaccgcttgatcgaccctttactgctgcggtgcaagctgcttccctctgctctgcagaagatggcgctggggatgttctttggttttacctccgtcattgtggcaggtgtgcagaggggtgtggggcagggggctgaactttgggcttggggaagtctgcttccaccatgggctgatgctgaagtggtagcctggaccaagttcagcctctcccagtgggcgtcagtgttggcttcccagaggtgcaagctgaaagagaccctcctatctaatccagctgcccctcattttgacagaagaagaaactcaggccgagagaggaacaaatattttcccccagtgaattatcagctccttgaaggcagagatagtttttctttttttattcactgctatgaacatgcacgtgggccctccataaatgtgttgaatgaattttccacttagtggcaaatgaagacttaaaaaaaaattatcttccttcttccatttcaaaaggatctgaagccatttgttacaaagtgggggttggtgggggcagtgggggggatcagctaaagaagtctttcacactgttgcacaaacctgaaccctttttacttagtaactttatgaccctgaagttccttagagtctctgagctatgtctttaaaatggggacaggtgtcattcggaccctgagcagggctctgcccttgtggaactcagtctgatggggggtgttgtgaggattacagcagatgaagtctgtaaagcactcagtagtgtgcctggatcacaagtatgtgctggagaaatgaaagctccataaacggtattgtgttgaaagtgtgaaaacccaactagattttattccagctatatccttaaagcagtttgtcctattttatcctcacaataatcctgggaatgttattcctgcttcttgagtaagggaactgagtctagagaggttaagtgatttgcccaaggtcacacagctagccaggctgggaacccaggtcccccaactccatgtccaatgttcattccactagagcacagctatctcccaagcaacacaggagaaggagataacatagttaaacttgaaagccaggttagaaacactacagcaatacttgacgttgcagtagagaagtcatgtgatatcatggaaagtaggccagctttgaaaccagacataccagagctcaaatccagccctgactacttatcagctgtgtgactgtgggctagttgcttaactttctagttaagcacttgaaagtgctagttatttcactttcttccgcagcaaggatgcatggtaaatgcctagcacataacaggttctccattaatgagagttgttagtgttattgagtgcaaaactcagcttggagcttctagcagccaagaccaaaagggaggagttggtcacatcttggccccctcctccaccccccagtccagcattcttttccttgcctgctgctcaatctttggctgcttcatgagtaccccatccccaccatgtacaagctcttctgtgggctaagctgcctggggtgggcctgactataatccccctctgctcctccaccaggagtcctggagatggagcgcttacactacatccaccacaacgagaccgtgtcccagcagattggggaggtcctgtacaacgcggcaccactgtccatctggtggcagatccctcagtacctgctcattgggatcagtgagatctttgccagcatcccaggtaccctggatcccctcccctgctcctgcaccagtgatgggctctgcccggtggcacctcaaagtcaggtaccccagggatgcagcccccagggcccatctgcatggaggaaggcagtgttttctgaccagggctcattcacccaacgggggtctataattagcacctggttcaagtcagcccctatgtgacaggcactggggatttggaggcgagcaagaaacttcccacaccagctctccacgtattcccctggtgccaggttctccaccctctgtgtctttgaagttgctgttccctctaccttagactgaaggtgaactccaatatccccttcaattctgagcctaaataccaaggtccttgggcagaaggggtcctcccttcccgccccgtgttcatctctctatcatagcacacagtactctgggtcatagtaatggatttctatgtccttcgctccccaccctcccaacccccttccccgggctgggagctagagctgcaaggctggggcaggcccttcagtcagcaaaaaagcaagggcttcctcagctgcgggcccagggctaggctgggtcagacataaagaaaagactgaccctgggagctcactcagatggggagagagtcaggcaaacagtgagccagtggagtgctgtggaagtcagggcagagtgcagtgggagcccttaagcatggagaggaggcgggcaggtgagtgggtaggaggagcggtcttacaggcagagggaacagcataagcaaagacccaagcctttgggaagcgtgggggatagggctggagaggcatgggaggtgcagggagccgaagtgtcgaagggctttgtgcgctgagcctgcaccttgggatttctcctgaaggcaacagcgcccctcctctccagggggttttggccgggaaaggaccccatccgaggtcctttagactgatgctcctggctgtgtgaggaggacaggagtcaggggagtttaagaggcatttgcagaaagtgaccagggctggggttggacccagggcagagggaatagagagaaggacatatatttagaatagatttcagaggctgtatcaaaacaatttgacgatgacgttgaaggtgggcagagagggtggggagagagaggaggtaaagatggtgctgtcactgaaatgatagacctggcaggaaggggaggaggggagacagagctattggggcagcgcatggagtaccccggtgcaggggttcagccaggaggcaggtgagcagggcagaggggaaggcggcattgatgcatgggtgctgtcattgccactgagtggacaggcatccaggggaagcctggagggtggcttggtgggggcagggtcaggggcagcaagcaggggcctgggcctgttctctgcgcctgcaccagcccctgagatcgtctctgctccccctctgcaggcctggagtttgcctactcagaggccccgcgctccatgcagggcgccatcatgggcatcttcttctgcctgtcgggggtgggctcactgttgggctccagcctagtggcactgctgtccttgcccgggggctggctgcactgccccaaggactttggtgagtatggggcctccccaggagtgggacatggatggagggaggcttggaaaggaggtggcaactgctaaagtgctttgactctggggagaagcaagtagagggctagacttgggagaatggggttctagcccgggcttggccagtcacccacagcgtggcctccctccttgggcctttctttccccaagtgttgaacttagtggacctccaaggctcctttctgcttctggaactctgccatctctggctgaagggttacctttctcatggtgtttatatttcacgcccccttctgaatagctgaagaggaattgtagacacccctggagatcttcaggaagtcaaacattagtgggtatctgtccagtgtcttcagatcccaccactgcccacatggcctcagttgccagccccagggctaggacacggcaggcacagggcgcaagacagaggatccctgtcctgacccaaatctaacccctcctttccccagggaacatcaacaattgccggatggacctctacttcttcctgctggctggcattcaggccgtcacggctctcctatttgtctggatcgctggacgctatgagagggcgtcccagggcccagcctcccacagccgtttcagcagggacaggggctgaacaggccctattccagcccccttgcttcactctaccggacagacggcagcagtcccagctctggtttccttctcggtttattctgttagaatgaaatggttcccataaataaggggcatgagcccttcctcacgaccatggtccatgacaaggggcagggcagagggggcctggatgggagtccttgtgggggaccaggcaggggacttggatcaacaagcaccagacgagtggcgggggcaggcgagaggctcagtgggacctccaccctcgttgccccagctggtggctgaccaggtggctgtggagggtcaggagctgccccggatcctctccatgtagttgcgaagctcctcagggtccttcagccccatgtcctcacacacccagcggatgtcctcctcgcctgccacaaggatggactgcacagcaggggcccctacaggctcctcaggtgactgggctggaggggctggcgcaaatgtcacaaactctactcgcttccgccgccccccagcctcctttcgggccagggtgcttgaggagctggtggtgcccccaggagggccaggggccagggtaggggcctcccctcctcccccactctcacaggggcagctcccctcccccttgggcgggccaggggactgccggtccagctggcggctcagttcctcctggtcagtgcccagccagacccagttgtggggctggggggaggtggggtcagtggcactgtcgggaggttctttgcgctgatagcgcaggacgaagaccacaccattgaccaagaagatgaagatggccacgcagaagactcccagcagggcgtacatgcccagctctagctcagtgacatgctgaggggcagggaccatctcctcctcctcttcctcctcctcctccctggcttcggtctcctccttcctggcctcctcctctgcccgctcaaacttgcccctcacacctgtgttgcccccgacactgcctgccacctgccgtttaccacccatggtggcttctgtggctggtgggctccaagcagggctggatgggagagcaggggctggagtggaggcagggggcagccccagccaggcggtgccagaggccagaggcacacggtggcggccccggcggcagggctcgggcgggtgcagagccacatgcagcggcagcccctcggcgcctgccccactcaccaccaccccgagctgggcaccctgctcctcagctggcaggatggcaccaggctcctcggctgagacggacagtcccaggtcacggcggtcgtagagctcagctggggccacagtgtgatcagagaaggacagccatagggagagggccacctcctgtggggcacacagacacaggcagagacatgcgagggcacgcacgcatgcacagagaaaccactcccacagagataggccacatggaggagagaccagagagaaaacagagacacaggcagatagacaaaacacagggagagaggggacgcgtgtcaatcacctgtctgccactcagccctagggtctgagttattgggagggtcctcagttagagccatctaaccaacctcccactgccatactccagccactgcttgatcacctccagctgcagagagctcactacctcacagagtcagtcctcactctgaaaaccctaaggggtcgaggtaccagggtcccttcctcccattcccctctaccatgagcccccatctggagatgttgacctcatccccctgaccccccaactgtcacctgctttggggcgggaagggctgactgtgcccagcacgtagctgtgacctccccggggtgggcagtgccccggctcaaggtcagcgagatgcccatcactggctgcaccctcagctccagcactgagaccttgtcgtccgtcacagccagcgcctgctcccccaggatggagtcagacagtggggaacgcacctgagggtggaaaggagctggaggtggggggccttccatacagacagcccccacccagagggaaccgggtgctcccagcaccctcacgggctgccctccggaggtgggggaggtcttcgccacggacagcccccacccagagggaaccgggtactcccagcaggctcatgggctactatccctctactctttgcaccccggtgcatacctggaccccaatcccacacctagggggcagttcccttttccctcaagacccggtccccacactacccacacctcagcccttcatagctagagggcttccccccttatgcggccaccccattctgagcctatccccaatcccactgcactcagacctagaccgcacaactcccccacacactctgggctcctggcacactcttcactcccacccacgaacattttgggggcccctccacccttctcagggggtctactctcctggtccccagctgcttacctcaatggaggtgacaccgggctcccggcccaccacgacacggccaccctccagagaggctacacgcgagtccagcacgcgggcgtgtggcgccacgaggtgggacacgtctagcagccagtcggggccaagcaggtgcgtgaggcggcggccgccgtccagcgggtgggccgcgaagggggcgaggaagcgcacaccggcccgctggtactgcaggtggcagccacgggcgcgccgctcggcctcatccgacgcctctgcagcgggttccgcaggcctgcagggcggggaggccgggactggccgtcagcgctgagcggccccagcctgcccagggcccagctgctggagacccgcagctcgtccccggcggctcctaatcaccagcagctcctgtttctcaaacgcagacatccgcccctcttggggtcaggcccttccacctgcaggcgagccgccccagcccactcccgactggcgctgtgcctcgatcaccgctcttgctcccaagtggaccgcaggggagacgctctcttacggggaccctgggggcgctcactctctgaagggcctggaagctagattccagaggcgtgggccacctctccctgggttttggggagccccctccgagggtgttcatttcctgagctctgtgtcatcttaggctctgagggtacgaccagcatagacagaccgcagcttcaaggggctgacattctcgggggaggagcgtggaaaggatggacaggcaacattaaccagtactgacgtagattaggaagtggagggtgctacgggagaagtgaggcagggaaggaggagagggatgcggaagtcagcaatttcacagaaagcgatcattggctgggcggcccagggtggaggtgggcagaaggaactgcaagcaacagggcagtttttctgaccccgacttgggcccatggctgtgtcccctgcgccctctccgtcccagtgtgactcgccaaggcctgccagcttcctcaggcctccactcacccttcagcagggccaggtaccctccagccgcggacctgctcgagggtggtgtcggtgagctcgatacgcagcggtagcaggggggcccacacggtcagccgcagcgaggcgcggagccggcgccaccagaagtccactcgcaccccccgggcgccccggctctccttgccagccacgaacacggcatcacaggcctcagacacctatggaagggcagagggcaggtgggcgggctaagccactaaagacaggtgtgaggctgggccgggtgggtggctcatgcctgtagtcccagcactctgagaggccgaggtgggtggatcgcttgagtccaggagtttgagaccagcctgggcaacatggcaaaactccctctctacaaaaaatacaataaatcagccgggtgtggtggcacatgcctgtagtcctagctactggggaggctgaggtgggaggatcccttgagcctgggtagctgagactgcagtgagccggactgtaccattgcactccagcctggggacagagtgagactctgtttcaaaataaatagattaaaaaaaaaaaaaaggcatgggccagaagagagcagccctgacctcaggccgtaggacgggctcccactgagttcagctctgtgtgtcactggaatgcatgttgcagcaggattgttggttaagcccctgttctttgtttaagattttactgtaggggccattccttgaggttccctggggctcagtcaggggaactggccattgcataccagtcttcctcctggcagagcaggggtgtgaacccaaaactttggctccttattcatgctggcctttgacattgctcttggagccacctggcaaccagctacagccaggtaggcagaggtgggacaaagcagatctcccaccaaggccctccagcaggaaccacacacatttgagcaaaggaccacaagtggggaaaggcaccttcccccttcaggtggctgggatttgcatacatgcagactccatgcttcccctcttagaacttcaagatagaggaagttgctctaccaccctcccttttatttcacttcacaatcaccggtaataataataataataatttttaccattgtataattattacatcatattataacagcaataactgccattgtttcagcccctgctatctgctaaatactgtcttaaagtgcttttaattcttacaacaacccgaagatatgttctcattttaaagtttaggtaacgaggctcagagaggttaagagaccagcccatgatcacaaagctggttgacaacaaagatgtgtttcaaactaaaactttctgatcccagagtatgtgctctcgactctctcaggccagcgcacttgccagtgcaataatgagcgtgaaagtgtctaaggtcggggggctgttagggttacttgactcgggagagaggtggctggaacaaaagaagttgaagctgtggttcctcccatgaggtttctcgtctcaagaagaagctgttctcttggggacccacatgaggaaggaggaaaggtgtgtgtgcgtaactgtgcccacacaaatgcagactcacatgagctgggcacctgccactcacctgcaggacctgtgtgttggcagactcgcagccgacatgctctgtcacctccaccaaggcccccccgccgtccacagtgacaaggcgcacggggacatgctggggcactccagtcagtggtgctgtattcaccagctcctcagcctgggggtggaggaggggctcagccccaggcccctcagctcatggggctcctgggacttggcctccagccttcccaggcagagatggaggtctccttaccttggccagtgggataagggctctgatgtcccgctcagacaccaggatttcccacaccattttgtccttctctgcttcaggggcctggcctgggtactccagctgccacgtgacggggcgagtgaccgctacgcccccaccagtgctattctccaccacaaagtccacccataggaactcagacagttcaaggggactgctggccaaaggagacagagaagccaaatgcttgctagctgccaggcatggcctcagcacttcctgcattcatgattatccccattttacacaggaggaaactgaggcacagaggttacatagctcacttaagaccacacagcaaaaagtagcggggctgggatctaaacccaagcatcctcgctctagaccccaaactctgacccactcttggcctctctaagatccatgaagccatttaaccacctcccacctggcaaggtggctcactcccctgcctgcccgggcccgcttcccccagacttccgctttccacagccactgaggtggcatgcgggagattcacttccaggtcccaggaccagacacttgaccctctgaatgataagcttcctttgatcaaacaaaaacctatgtgctgggaaccgtcctgggtgcctgatatgtagcactgtattttattttcaaaaatgctaagggatgcattattattcctatttcacaagtgaagaaactgaggcttgggtaggggaatgttaactggcttgcccaaggttttgcccatcccaaaagcatcagaaccagaattcgaactggggctactgagtccatggccttgacccaggctcagggcatgaataagaagagttcacaaccgcagaactgcagctgggctttttgggggaatgtgaacggcccagagaaaggatcatttggtggaagcagggggatggagtagtggctatgagggctctacctggggcacaggattggttggcatctcttagaataagactcacagacacttgctatgcctggcacatggctggggctgggaagatagtggccgaatgaatgaatgaaggaatggattatgcctgctttgtgctgcttccttgaaaaaatctgtccttgggtctgctcacctggggatctagaggcagcatggcagcctccaaatctgctcaactgcactctataaccagccctccctcctttgccccctgggtggagggaaactgcccacctggaatctggctctgtgagcccagcacggtggcaggtgatgagggtggtgtggtgcctggagcccttgaagcggtccagcttggcagtccagagtgtgggctgggctgggcgggcggctgtcacatgcagccccttcttcaccttgatcctggggaagagagtataggctcagtttggcaaggtgcatgctgaactgtgggctggattgaaggggaaagacaaggagccaaagccatctgacctccctggctccagtctgaatctcctcttcaccatcctccaacccagaaggaccccgcctcagtgcagctcacaccttacagctctcccccacccaaagaccacttacgcctccccactgcccataaggtcaaagcttagccgggcatttgggggccctccagggtctggtccagccttaacttcggttgtgacatctctccatgcactctctgcttcagctacacacaagtttcccacacacacggcacccattcgtgactccaagcctttgcccagtctgtgccttcagcctgctctgccctttcttactttacctgctgatgctttaagcctccaacaactcacagaccatttcctttagaaagcttttccagtggtgggatgaatttcccccttactgcacccactcacctgagctcccaccgcactttgaacctccctcagtgcttacacacccacatgccttctaatccaattcatgcccatccagctcccttccctaccactgggggcccctttctgccagatagggactggcccttgctcgtgtttggatctgcagagtgaagacacagggcttggcaggctgtaagtgtctaggaaagatctgcttaataagagtgagcataggagggcgtaggagatggggagacacagagacgggacatgcacaaacccaggcagggcttgaaactaggtctaggtttcaaagcatgtccacagaccgctcttcgatcctcaggaaagatatcattacaaagtgagcaagtcccagtgcctcaccctaaccaagcccaggactatcctgcctagaactcaggcttctcagaatcttaaagcctaagagatgcctctcccatggattcctgcgctggactccagaagcaagtcatactctgcaagcccttgccgggtgaactgggtaggtgggtgggggctgctttgggggaacttattacggaaaaggacacaaagaatcagggccttcctatggggaagagcaagctctgtccaaaggctagactcctacggcgagggtggcaaggagggacagcatgtaggtgaacgtgattggggcaaatatccctctctggagcactggagcaagagctcacacttaggtactgcagtctctaagccctttgcgggttcccctccctggagacttgcagctgccctgaaggtggaccgttagccccattggacaaaggaatctcagggaggtgccaggggaaggggcagcttcctacttctgactctaattccagggctgtgcccatggtgggctcctaccagcacagtcatggctttttacctggaaggagtttagtttggtggacacatgttttgcagaggtcaaggattccagcaaggaccccaggaggagcaggtacctgtccctagtcttcccacagaggttcccaccctcacccatccccgtggcctggtgctcaccgcagggtcaggaggctggctgtgaagttgtgccgaagcaggagggtagcactaaagagctggccgggccgcactggcatgtcaggcacccgcagagtcacagcctcgtccagaggtacctcctggtactgcggggggtctgctgggcgcagctccacaccccccactgggagggcctgctccccagggtcgttctcctcgccggagccacagcccccagggccctcagctgcaggctcaagcgtgtaggccagctcggcccgtgtggtggaggcctgtgagaaccagtgcgagggaagctccagctccaccacgcaggcgcccagggatggctgtgaagacacgacagcagtaattggcatgggggtgggtgcagggcgaggaacaggattctcagcacccatggcaggaaacccagagctggaggggctcatgaaagggaggcccagcatgggccggagacacagcctgagtgacacagcaaaccagcaacctggctggggcttcaaaccaggtctaggtttcagagcatgtccgcagaccactcttcagcccttgggataggtctcattacaaagtaagccaatcccagggccttaccctaaccaagcccaggactatcctgcctagaatccagtcttcttctcagaatcctaaagctcaagagacgcctctcccatggattcctgtgctagactccaaaatagtggaaatagcaattataaaagtaacactactaataatgcaaacacactggctgattgattactctgccgtaagctatccttacattcatctcacttgttccttactccaactccagatggggtaggaattcttaacaccccattcttcagatgaggaaactgaatctcagagagattaagttacttactcaaagtcacacaccaaggactgaactccctctggggccctaaataaccttttcacagcactgaaagctagtgggggcagaaatggagtcgggtggtccacaacccccgcgcttcccaggagtgggggtttcctctctgccgcgggcccaccacctggctgatgcagctgcagcaggaccagcctaggtggggcctgtctactcacctggaagcggcaggcttggtgagcagtgccggcagggtgtgtggcatggagccgggcacagggcaggctgccagaccctggtggccaatcctgccctttgaggtggaagagaacccgggcgtagggctctgctggagtcacagccgcttccactgaaacggcccgcacgtcccatgggactggccgttggtggggctcagtgactcgaggggggaccacctggagggagaatgagagggcttaacaaaagaggagcttgggaggggaagatctaggaagatgggatcccagcttggcagaagagaacctttatgggcctcagtttccccctctggaatatggggagcacagccggggctggggaaggctcccaatttgtacccagcagacctcaggccctgagtcctgttagcctgagagtccccggtgccccctccttacctgctgagtggcaaaaggtgggtaggaggcccggagaagtggctgggccctgggccagggctgtaggagcagaaaggtctcagatcgggagctcagagaggagttggcaggtgggtagtggcccacctgctgcacacggaagtgttcaggggcgtctaggagctccagggctgccggcaggtagacagggtccaggggagcctggccacagtccactgaagaggcataagagggagagatgatgacagctccagagctggcaggggctgacccgggtgccatgctggggcacagtagttgtgggcaagggagggagaaaagggctgtaaatgtcccttcccctctcaccaccatttcacagatgaggtcactgaggcttaaagagcctcacacaggtagtatgtagcaaagccaggattcgaatctgagtccaggactggatgcttcccagctattccttctactttccacagaccttggccttcttctcgccaacagccttctcaatgtctccttttccccaactcctgccctccatctactcgcctctgataccaaggcacttctggggtgcaaccgtcggcagactgggccagtgtagtaaaatatggtaatgaagtgagctttctctgccctgaatccttggccaggctctgctgggcatccacccctcctcccccatcattgccatggcaacctgcaccatctttccaagcttgctcccttcttccctgaaccgactggtatcgagtgcaagtgtgggatgggcgggcgcggaaggtgctgaagaggtctgtgaaggcacttgcttgccctgggggtggggtggggaccaggagcctggggaagacagtcaaaatagtcaatcatcagaaggacaaaggagcactaagccatattggtttgctctaactatgagcactaataataataattagcattttgtgaatgctatatgcaggtgagaatttaaatactgtatgtatatgaactctttgagtctttgtaataattctgtgaaccaggttctattatgatgaatcccattttgtggatgtagaaaatgaggccgagaggttaaggtatttgcctgtggttccacagctggagagtgaaggagctgggggttgatcccaggtattagccactagaccatccggcgtctccacctgccacttctctctccactctccactgccacggtgcaccctgcaggcttcatgccctggagcgcacctcctctcctctgctctgcccggtggcacctccctcctcattcagggccatgagtgaatactgcctccttctgaaggaagccctccttggttactcaccttcccaccagtctcctgtcttttgcaaccctgggtgcctcctctgaattagtaatcttcctataaacaagggaccctgtcttgctcatcctggaattcccccaaactaggaagcgctccctagagaggatttcctgggagcctggagacctgaatttaaattgatgaaacttgggtcaggcattaacattttgaagcctgtttcctcacttgtaaaaggggcaggagcattaggtggcactgtggacaggacagggctgtgtaaactgtggagtgctgtctggagggagcaggcattattgctgctgcataatggatttgacaaggttttcctcctctctctattaggactcccatggcgtccctcgggatggggagcaggtggctgaaagcaaccccacagctagctccctctcagccccacagctggactgtgggtgggggtgggggaattggtttcaacctccttcctggccctccccaccaaggagcatatgactgacaggctctccctgccccctgccccaagcgtaacaagtgaccactgctctctgggggcagccactggcttcaggttcgcctcctactccattgcctccataattacaagatgctcttagcctgactcccacggactcccatcacccagcgctcggctctctcggtggggagggcagagaatgtttcactgtccctctgtcttctgtggcatcctttgccttgcagccacagcccagctagcccaggccaagggagtccgacccccaccccgaagcacagggaagttgctgccctttcccgcagtgacaggaatcctctcaaaggttctggaaggcaaggatgcggccatccctggagacgccaaggtcagggagccctgggggaagggggagggagggcttgcgtctgttgcaggtcccaggcaaaggggctgctttccactcccgaggggggtgggttggtggcggcggaaggaggctaggagggtgcagcgctacagaccacagtgagggagtggggatgacgctagtgcgcccgggaccggggccgccgggttcgatgcccgggctgaggggtccctcgcagaaggtgcgggacggggaagcccctgcgccgggctgccccgggtcaggaaggagttgccgggtcgtgcaaggtgaaggaagccttaggggcgagtggctgggggcaggttcccgagggcaagaactctccgaccttcagggcgctgcggggcgaccccgctcagggttcagtccgagaacccaaaggttggtggctcccgggcatcactcgctcccactcggccgggcccggccgcccctcgccccggccctcccctcccgctgacctctcacgacgtccagggcgagggccaccaggaggcagagccaggggccgtagggcccccgaggggccgctgttgtgcgaccggccatccgcgcgcacatccttcccacagaaggcggggacgaggcgggcggctcaggtggccccagtcccgcacggcatctcccgcacccgctccgcgccgtccccacctggcccgctgggtcccggccgccgccgccgccgccgccgcccgccccgcggctgcaattcccagacaatggagcgggagcagtggggtgggagggagcgaatcgcagcacatgggctgccccctccgccccgccgggtcctagtgccctacggatccccaatccctgcgcgctcaggcgaccgaggtcgggaagagggccacgtccctggaagcaacagaggacggccgcctctgccaggagggactcggtgagttctgtgtggctccctcacggaagcttctgatcagggaagaaaaagccactttctctgcctcacccacccccacaagcagctcacttgtgaaggcatctgacacctgagtcagaaccagaattcagggacacatgggacgggagctgcagggacaggaaaggagggagggggtcaaacggggccagatgccaaccacctgagcctgccctgacagagctaggccaccgccgtggaggaagggctctaggtgcaggcagctctagtctcttgaccagctccacctgggcagcgtcctgcagcgcttaggagggttgagggttgcccaacactcccgagggaaggccagcctcaagggtcctgacccagtgttgcctaccaggcagtttggggagaggcccagagcaggggccccagctgcacactctcatgccctgggcagcttacaaagaaaaaattatgtctgaggccctccgcaaaattggtccagcctgtgggccgactggaaaccttggcacaggaaagtcctcaggtgggtggtgaaggggagggcaggcaagtcttctccaggctgcccacccacctcagcacactgcagggaaggggtgacccctctgcccagcaagcacacgcatttccagcagtgccagtcgttcctacgttttgtaatgggggcatgctttcctaattccttgtgctcctggagggaagggtacctggtaccagcctgccttttcagctctcccctctgccagcttcacactgcccccacagggagaaattgggaggcggagctgcactacagaaatgggtttagcagtagaggagacatggaagcaatccagacttggagtaaatacattttattcagaacaagataataaaatagcgtgcactttatttaaaaccaaccaagcactgataaaaaatatatatcactgcagctgtgattccacatcaaacctgaacagtaagaattgggcatttattcttcacatcatgtgccaagcctggcagagaaggacatccacctccactagagcctcaaaggaaaagtggcccctaaccaccaagacagggtaccctggtggagaggggcagctggcagctcaccctgctctctgcagaccacgtgaagggaaaggagctgcctgtgttcctcccgggctgccggggtgggcactggtcagcaactccttctcggtttcaggttgtggagcgatggggagagaagtgcatgcagttgtgcagacaaggaggcgggtcctccctcctctttcagggtctctgaaacccccacagggcatataatgcccagcaaggtcccacttgcaggcacatgcctacaaagcagcagccatcttttgctttggctgatggggaatcaagattctgagagtgactgctcttttcttgacacaaagcagccacagaacactttcctacatacagtatggcagcaggcaagcagaaggccctgctggctcggattaaggcacttgaaagagacacaaggtacatcctcctcccctgcagcccccacaggcctcaggggaccctgtttccccaccctttatcctcaggtccccttacccctgcccctccctactgctgggcaatgaggaggacaggagcgtgccttaaaggaccatggtttggtgggagtacagggtaggaggatgaggaaaacaagaagggagctggagatttggccaaggagcaacttcagaaggacaggagagcacgagcattaggaggaagccaaggcagcagcagagggaagccagttaagtcatgagagaccaacggcagtgatgtttgctggcgcagatgcagaagccagagggaggcccctccaaccttccctggtgaggcaggctgggagcagagaaagggttaagagagccaaccccagacagagaacctcagaagacagggccgcaaggacaggcagggggaatggtctttctctgtttctcttggctagtggggctgcggcaaggatcaatgttctgaaggttcagagacagggcaagaaaagggcagggggctggcaggagggctgcatggccccgaagcagctcagctctttggtatgacactggcggtgtgtggggcatccggctcactcctcctccacactgcgggcccccttggccgctcgcctctggcgccagcgcagctcctccacctggcgttccagccctcgcaccttggcctcgagttgggccccagaggctcgggagccagtgagccggctcagcagggcgtagaggatcagcaaggccaggagtagcagggcccgggtggaagggtcaggcaccgacctcatcagggccacgaagccggccaggaagatgacaagcttcaggccccacaggatccgccccagcaaggccaagaccaagccgaggagcagagacagcagccagtagacgaccagggcccctgctccccacagcaggaaggtctggacctggccagggctgagcttcaggccctgggcgaggtaatcacctggaagccaagagagtcacagagtcagccaacctggagaagtggtgaggggagagcggggcaagagctaaaagggtgggaggtgctaggcacattgcaaaggaataagccgttctcgcagactcagagtgatatgggttggaatctcagctctgtttcttgctggctgtgaggcctggagtagattacttgcttctgttgagctgcagtttcatttactaaacgggaacaattctactgcctccctgtactgtggctggcaattaaatgagatactacagctcagcacgatgcctgataggaagtgaacaactggcacgtggtggcggaagttcttttttagggggtctgggtgggacagggttttgctccatcgccgaggctggagtgcagtgacgtgatcccggctcactgcaacctctacctcctgggctcaagcgatcctcccacctcagctcccaagtagctgggacaacagacacacgccaccatgcttggctaattttttatagagacgaggtctcattatattgcccaggctggtctcaaacttctggcctcaagtgaccctcctgccttgacctcccaaagtgctgggattacaggcgggagccaccacacctggccatggtagttcttggcttgctctttggccatgtctctgcagaatcctgggaagggttaagcagcttggggaaaaggctagaccctgacaaagatgaactcccacaagtaggaaagtacaggcaaagctctggctgactacccagcactcgaacactcaccagctagtcccaaggcattcagcagctgtgcggcgatcccagacagagcaaagaaggccacagaaatggctgatgagatggcccacaacacttgggacgaagactgtggaaagagcacggagcgagatgagttcataatgaacaacggtcctcgccttcacgcctgatcaccactgtccaggcaagaactgcaggaatgtctcagacctgtttctcacccagtggtgacaggcctgggtcagagggtaggggccttgggcctggctgaggggtcccttccacatccaccttctagtctacagggatggccaacaggctgtctctccttcctgaactggaaactagggcatctgggacataatttaactgctttgctgggatactttggagggagtagtaggtgtacttgtgtgtgaatgacggagacaatcaaatacttttagtagtcaccctataaaactggaggcctgctagctgtccagggagtcatgaaggtgcgtggagaacatctgtaaagggataggatgttccagtgaaaaaggagtctatcagctatactatattatggatttaataaatgattgtctcagcccttcagtccagcctatcaaaagtatgtgataccatgcttgggatgccaccaggtaaaaaaagataaccctgccttaggctcccaataagctcaacccacttctgcaggtgaaggaatggattcaggacttgatattttgccatttcgagattctaggtcagatttagaccaaagtgagactctacagtcacccagtaacatgggcttataaagatggctcatttcccagcctttctggcaaggaaagggcaggagccaggaaaggataggggtggagctaaaaggccctaggacagcaatcaaataacgaggaattcaaagacaagtgctgtgtggcttctttttgtggaatttggggctctctgcaccagagaggatgtggaactaagatgaggtggccattaccaacctttcttcttttatttttccttaatgtgtgtagtcacacagggactaccttccttacctctgacaccaggtgcatggtctctggcccaatccaggcatccagtgtccctcgcacagatcgacctatctgggtcaagacatcaactggggcttctctcttctgttggcctggtggtgcaaagtctcgacgggactgggccaatgctgagtggaggaggataagggccactaggaccatcagaatggctttgaacacatgctttccccatggtgaactgatgctggaggctgccatgactgggtctgccaggagagaagcacagtgagctgagtgccatggtagacacactcaccctctcagctctgattatcccaacatccttctccacccctaccccaagcaagcaccaaactaaccctggaaagaaagtgctgttagctgggagaggaaggactgggacttccaactgaagctgggcacaaccatctgactcacaggttcctctttcacattctttaccacttgcatattaattaaccagcaagtattattcaacactttagagttggcgagaagatctctctaaggtttgtgccagttctaaaaatctgaaggcctgtccctgtatcttaggtgctataggcataaaagtattataagactctataaaggctctgtcccaaggagcttataatctacttaagatacagctggtataaaaaacaacttaaaaatagcacacaagtaggattactgccatataatggtataaagaaaagtgctcagttatgtgctcaaacaagaataactgcacatatgtcatcttctctgcaggaccatcatgtgaggtggcttttatcctcctcgcccctactggtacagacgagaagaaactgtgactcagaagttaagcattttcccatggtcactgggctacacagaaaggccaggatttgaacccaagcttctgcttccacccatcttcattaggagtcaagttatactgtgggtctcaaccatggctgctcactggaatcacctggaagcttcccaagtactgatgtctgtgtccccagcccagaggttctgatatcattgtctgggtgtggcctagccttggatctgcaaaagctccctaggcagttccactgcatgaagttgagaaccactgatacagagtgacctcacctccccacccccaatggaggtgctatggtttgaagagcaaaactcatgttgaaatttaactgttcttgcacctcctgcagagcctgggagctcccagtccagccaaggatgttggatctcatggtcctaagtacttctttgacaccccattcccctcagtaaaatagtttgaccccttctccaccaaaaaaaaaaaaaaagaaagaaatttaattgccatgatgatggtattaaaaggtgggacctttaagaggtgattaggttatgagggttcagccctcatgaatggattaatgccgttatcttgggagtggattagttatcccaggaatgcagctcctgataaaaaggatgactttggcctgatttcctgtctctgtctcatgtgctgggttctgccttctgccataggatgacccttgccagatgccagcgccatgcccttagacttcccagcctctggaactgtgaccctaatgaatttctgttcattataaactacgcaggcagtggtattctgttataggaagcagaaaatggacgaggacagtgagcaagggtataatgaacaacctttaaagaaatactattaataaaaagctaacattcagctaggtcttgccatgcaccaccgcgctcatttaactgtcacaacagcccatcgggtaggtgttgctattatcccccattttactgaagtaattgaggcaggttaagtattaactggggaaatcagcatttgaatgtaggtacttctgacattggacccctcatacacaacaactctgctgtattgtctccaactaagtctcagaagtgatttagaaagtcatacaggccaggcacagtggctcattcctgtaatcccaacactttgggaggctgaggtgggaggattgcttgagcccaggagtttgggagcagcctgggcaacataggagaccctgtctctacaaaataaatataaataaataaattagtcaggtgtggtggtgcgtgcctgtactcccagctatttgggaggctgaggggggaggatcacttgagcccaggaggtcacggctgcagtgagctatgatcatgccactgtatcccatcctgggcaagagagcaagacgcttaaaaaaaaaagtcacacaacagattattcatgagttaaaataaacttggcatctaccaatcatctcagtgaattactggtgaaaattacctaacaactttgtgctttgtgctctggtcttgtaacacaatgccacagacaagttaagacccaacaagtgccaactcattgaagcaggtaaggatcagccaagaaaaagtacacaagttcaacttctacttgccactgtgcttgagaaatgtcagacagcgccagcaaattccctgttcccctccaggttcagaaatgaacctgtagctccaggagttttcatgattcagacctgatgatcagaggctaagccatgcccctgaggtaggagcagtcaggtttttgaactttttgcagttacacaggcactcagggagttgacaataaatccagagccatgagggatggagaaggaagagaatgatgtcctagtcttgcttagggggaaggaggagagtctaggaaagggttctaaaaatactacatttagggtactttttggtccagaaacagctgctctaagcccttccagaagcctggagggtcaagcaaggctgaaaaacatgcaattcatgtagaaggccctcaggctgggaaagccttctactgtctttggcacaaatcaagaaccagatggttcctgcctgccagtggtcgcagatgaggaaagcacaggtgagttcctgagctatctgggtcataaccatgttggggacttaaaagagcagggttgctatcttgggttggatcctttatccaaggacctccaccaggagggatcaaatatcgtttcctcagccctaggaggtcagggtgccataagctgctcctcccacagcagcctgccttgttctgtgccagccccaactctccagtggctgtctgccccagttaaggggagctaggagaccttgaaataagccctctgcagtgaggctggcatcgttatgcagactgatgttctgaagtgcaccagataccaaacctaacaggattgtgtagtgtatcctttggagataatgagtgcagagattggctggctggtctgctttttcaaattgttttctttaataggattccttctcatttttttccaggtgaatctcaggcagtatggactcactgctattaggcctcctcactttggcctaatcaaatagttttactaaaggcatggaaacagtctcagcctctgagaggaggaagcatgtcttaaaacttcttcaccttctgcaatgcctggcctcagacaaataataggcactcaattaacaactcataataatacaaatgttatacatatctatacatatacatatgttataataatttttgtgtggtgctttataattcacagagtgcttattgtttcatcacttcatttaactctaacaacaatcttttaaggtattattaccctcttcatcttactcagaaaagtatggcttagagaggttgagtgacttatccaagatcacacagcagagctgggacttgactccagtacccaggatctcaatcttgcctttttgcttgtcccatacccgcatgctgccttgatagtggacatagtccctgccctcatggagctgaagttcaccaacaagctcaaagtggaaggacatccagactcctccgagggaacacataccaggagaccatctgccttctgggcttacaggccatggttttgtaccaagaggtatgagaggacagcaaaaggtgggagacaaaacctgccacttctgttcggcagctgcaatatggctcaggtgggtctggagagcccagcctggctggggaaacagctttacttattgtgttagtgagaaggcgccactgcttatgtttagctgtggtttgctacaagggtaggatggggcatttcgcgcccccccctcccaatcaaggctccttcctcctcttctctttccttttgttagtttcatttcatgctatgaatcaccaggtggcaggaggggcggcaaaaagtgccctctaccggctctgactgtcccgccgctgctcatagctgcccctaaggagcggcggttctcaactttggctgcccatcggaactgcctgtgcagcctgttaaacaaggacgtctgccccacccagggctactcactcagactcttccagagagggactcagccctttgttttgcaaagctcctcaggaatttcggatgcatagccagcagctcagggaaaagtctaagcaaagcttcaaaagtgcagcagtgtacaaaggacccctgacttccgtcccaggctcaagtgtgccacggactagaagctactaccttacgcctgttacttaacctgcctgagttgcagtctcctcaaacgtaaaagggagtgaacccaggtgaagagttgctgtaaggagttaagatatttctgcagcaagcgctttgtaaactaaacatctatagaaatgttgcagcacacacattaccactgactatatatcgtagcataatttagcagtttatcaacctgccttccccagtagaccgagcgactcccggttagacttgacatgttggaatccccagcgcctagtaggaaagatgactaataaatgtttattaaatgaatattagcaacctgccaagaaaccgtgagggtcgaacgagaaagccatggagaggtgaggagggaggttattttaatagtagatccaaatatacagcagccacacgagaagcacagctgagtctaaaggaaggtcctaaacaaggcgaagccgccactgcagagaatgaagtcagcgccctggcaggttgggggcagctcccactaaacccctgacagctgctgcccagcaactgtttgggggcagggcgacggcaaaggggcagcttccctgccgctccgcgccctaaccggggcgcagcctcccggagacagggtgtcagtggcatgtgctatttcgaacggcgcgtcccctgccaagcgctgaggggtagcgtcgctggcaaggaacgtggcgcgacccatgagtttggggccccccgaagggctcgagccgaggctgcaggaggctgggccgtgggtcggggttcgggggctcgggcttggcgctggcctggtccccacgcccgggagccgctccacctctgccggacctcggaacctcgccgcaaccctcttctccccggaaacgtgcgcctcccgggttgcctggaaacgacgcccccggttgcatagcaacggggatccgggtccccggtttgtttcgcacgctgggcgcgcggacccctccccactcggactctccaggcctcgcggctccgcctggtgccgcctgcagcggctgctgtctccccttcccgtgcgctgccccacattccgacctcggcccgctctcacctttctcaggccactgctatccttcacgtgcgacttcgctgaaacgcgccaccaaacccgcgcctcaactcggggcgctggtttaccttctccgcatgcgcaaggcgggatgagctcggagactagccggccttcctcacaatcgaagcctgtgccgggagcgcatgcgccccgctttatctattgcgtttctttttccccccacaagcattcccaccgagagaagaatgggatcggaagttccagcagggaacggaagtctctggctggaaaggggaaataagtgactatatctgggctgtagagtgggtaaactggatctttgaaatcggagtggaagctaatcctcctcttgccaccactcggcattttgggtcatgtagttctagagctacaaatgttccctggggcattgtgggcaatgtagttctaaccgagccgctaacgagcacctagtcttcccatacacttttcgcgctaaaaaggcacaaaagagaaagatattaaaggagcaattaaaagcacactgctctaggaaaacgaatgcgctcccccagagagaaaattcatacctgaatactgtagacggctcccaaatgttagctcagaatttcagagaaagagaggaaccaactctcactctcctttttctgccacaaaggcagtgcatagggacaggaggcagataaatgctaggtagaaaagagcgggtccctggtgaaaccccaccctcaagccaaaaagcctgaaaccatggcccaaagtgagaacttctatccatgtttttccagttgaatgttgccttttcctaagccacccatggctctgccctgcctcatcctgtgcctagaaagaccccagactcatctggcagagaggagaagcagctggatgaggggacgaccatggctggatgtcagagagaagcagcttgtcttcagagggacagcttaaggcgtaacttctgagacgaatctggctggagatagctggacttcaagggaagactacataccggcctgtcccacccccctcttttcagctcaccttccctctgaaatccactttgatcagcaataaaatcccaggcatttgtcctttaatttgttcgtgcagctttatttttcttggacgctggacaagagctcgggagccacgagtgcggatacaaaagctgtcacgctggccctctgcccttgctggtggagggcaaccgcgggcccacggagctgttaacacttaagctgtccacggacgacagagccaaaagaacactgtaacatgccctctggggcttcaggagcctcaggcactctgcctggacactgccccggggcctgcacggagttcgctcctgccggtgtccaaaagcgcacgctctggctcctgcacccactcacctgcacgctccctcctatgaggggtggaacgcggtgaatcttgagtgagtggagtgtgatcccactggtgctgaaaaacggctggcttgttccagcgcttgtgcactccagttcccgccttgttcacttgcgtactccctcccatgaggagttgagagcagcgggctgagtaaacggggcacccctgttgtgagtcctgtgaaaggtcagggcaatatcctgcttcagcagcaccgtgaaggagaatgaacagggcttcagaatgaggtgatctcttgcctgtcgtgtgatcctgagcacacagcttcatttctctgagccttcattgcttgacgttcaagaactataaaggacctaaaaataccacttcacagtaggtgtgaagtttcaaggaagcaacaagcatgaacattaaaaaaaaaaaaaaaaaatccaggttgctgactgaatgtttttatcaccatcaagagctgtcataggagagcttccttttgatgttaaaacttgtttctcaaactcaaccctctaaaacgtaactcttccctcccacccccaaccattcagccttccagttctgccttcctcctagagtacacactctgtaggctcccaatctgtcacctcacccagttgtttctttccatcagatgttcctcagacacatccatcttcatctgagctcttgtcacttcctgcccctcagctaagagtccttcttccaggacaggctctggtagcatcctaaacctcaccttccagcttttctaacagtttcaattttacatttgcttgtgcgatcctttctgatgtctaagattaacaatctcaggtcacagactttcctgggaaagaaatttaacctttttttttttctatgacaaattaatttcttttcaactctcttttccatgtgggtagtagaaacagtctcagacagttcagggttcttcccatccttgattttcaggtcgtagacaccttttggaaaatgaatatagggccaaagttgggggagaaaatgtatctaatcctggccgggggcaatggctcacacctgtaatcccagcactttgggagactgaggcagagggatcacttgaggtgaaagagttcaagtccagcctagccaaaatgatgaaaccctgtctctctaaaaataccaaacaaaactagccaggtgtggtggtgtgtgctgtaatccctactcaggaggctgaggcaggagaatcacttaaatccagaaggcagaggttgcagtgagccaagatcacgccactgctctccagctgggtgacagtgagtgagactccatgtaaaaaaaaagaaaaaaagaaaattcatctaattatcagtgtcagttaagctggcaacttctccctgactaatcttctgtcacttatccacacagattgctactgaagatacctgggaaattaagcttcttttgggtctttggccaatgtgtccccatgctccccaggcagcaacagcagctttggtctgggagcaacaaggcatagagttccttcctcagggacccaccagcaccaatgcatatatctcttttcccttaactctccctgtttctctgaaaccaagtgccctgaattttttctattccctgtgggctggcttatgaaacggaaaagccttgacaggacttcctttttcctgcatcctgctatcatagccataaactccccagtagagggacacctctggttttgctcattgtgatactaccaacacctagtatcgtgccgggctgacacgctatgggtactcaataaagattggttcaacaattaattactgagtctccctccttctagtctgtcccactccaacccatccagtaagtgtcttccagaggaaacttctgaaagtatggttatcactccatagctcaaatgcaaacacatgctgttgtgctgccagcccaatcaccacccaagttttaccaccttgggttcaaggcctctcctaaacggatccattttatttccaaccacacatccaagtacagtagttgagatgactggcctgtcaggcaacctgtcttccaaccaacaatcatcataaagttcctgctatgtgccaggcacaatgtggcactcttacactcttgagagcaagagtaaccagaacaattatggttcctgccatcatgaagtttacagtctagtgaagaacccagacatcagatacttataaatagataattaaatgattacagttctttgaagtggtttggaggacaatcacagtttgctgtatggactaaatttaaaccagggaccatgaaaagggctccagaggaagtgacatttaaggtgagactgaagtttacattggagggtttgagacaggagggggaagagggaggggggagaggacagtgatccaggcagaagttctgaaaccagccagcgcgggtatgtttgaggaactgaaaggccaatgtggctggaaagaagataaagtgagactgtgatggtcagcatgggccagatggtgcaagacttacgggcaagtttcctcagccagaaactctctccctcattcatggcctcaggaatgacccctggttggggctcagagaatgataccccaaagtatggtgctttagtattgtttctgagcaaataggctcactgcctgatgcacatagaagccaatactatggtaccagcttttgagaacagaaaggctttattgcagggccacccagcaaggagactggaggcatggctcacatctgtctcctaatttggggtctggggcaagatttaaggggtcagagggtgatatggtttggctgtgtccccacccaaatctcatcttgaattctcacatgttgtgggagggacccagtgggagataattgaatcataggggcaggtctttcttgtgctgttcttgtgatagtgaataagtctcatgaggtctgatggttttgagaaacaggagtttccctgtacaagctctttgtttttgcctgctgccatccatgtaagatgtgacttgctcctccttgccttctgccatgattgtgaggtttccccagccacgtggaactgtaagtccaattaaacctcttttgtaaattgtccagtctcaggtatgtctttgtcagcagcgtgaaaacagactaatacagatggcaaggaaacgtattaggaattttggcttggcagggtctgattggagggtgtcaaatttgactacacgggtatgttgaggtggattttacccctggatctttctggtcaacagaccctttgctcctgaaagagttccagcatttaggttccgatcatgtctaggtcttcttggtaccacagggaggaatcattggttctgggtgttgttagatgtcaaagcattttctattgggcatgccctactgacatgacttggagttttggctctgtcatacctacaagagaacatgacattctgttatcaaaagagtaggcccagtttggattggtcctgaggttacagcatgctgagcacttttgaatgaaaagaaatgggaaggtcttagaagctgccttagaaccaaggactttctaaccttctcttgccccctgacccccaccctaagtacagggagaagctctctctagaagttcccttatctgactgagaaaatttctttcagaagaaatgcaattgtctcaaatctccctccacaggaaactcatcaaataaccaggaaagattaaccactggagaagaataaaaactaaaagtcaccaactcaccactacacctagagagacttttaatctattcttctgatgggagctctaacagattacctgagagaccttatgtgcataataagacaacctttgttcacaatggagttctgcccctcaccttcccacaatttgttgccacctcctccagagctcataagaactttgtcccaaggcattgtttgttcttggggctcattcatttcccctaaaaattatttgctagccctccctaaaaattatttgctagccctcaaaattgcctacatttcccccatctccgtctttcctgggtgccatttaagtaagcatcagccacctgttccttctttgagcctcatattttgtattactcctgtgcacactcacacactaatacacttgtatgccttttctcctgttattctgtcgattgtcagttaatttcagcaaatctttagagggcagaggggaaacttttttgctccataccctcattcagttctcagcaaaaaaatcagctcctcagtgatgcactctctaagtgccctgcctcaagtagccgttcctccaatccccagcacctctgtctaccttgctctgatttgttgtattcatagcacttactactctggaattttcttcttaagtgttgattgtctctgtgctcccaccacccacagtagagtgtaagctccaagacagcagaaactgtgtctttcttgttgaccttttctatctccagtttttacaatagggcttggcacataggaagcacccaatcaatatttgttggatgaatgaaatgcctggggaataacatgaatagatatttcgttcaaagtggatcactgtctgctctgtggaaagtagattaggaggaggaggccaggctggaagcaaggaacaagtgggaagttactttgttggtgcaagacagagatgagatgcccttttgcatattaactcttcataagagttcagtgagttagttctacccttgtcatcactccctctgttttacagatgaggaaactaaggcatagagaagttcatactgccaatcacctgagtggtgctaggatttgagcacacagtctgacttcagagtccatgctcttggccactatgccatattgccttttgtacctgtaacttttatttttctctccaagcttttgcttacgttgtttcttcttccggaatgcctttcgttctccttctcctctgaatactgcccacctgtcaaagtccctctcactcacatcctgttcatcctgcccttttgtcttgataccttacagtccacaccacgtcttttgcatgattcctgagagtatcttatcttacagatatccacaaagaatcatacactatctgagctggaagagaaatagaaaatacaaaatccaaaatacaaaataaagaaatttataggaggccattggtttggactgagctcttctgctaggcctaacagaccaagctaaaaagagttagtcctgctgaagctccacgccaataagctgaaacgaagatctttacgaccttctgagtgtgtatgtgtgtgtgtgtgtgtgtgtgtgtgtgtgtgtgtgtgtaggggggagctaaattcccaaacaggcaagttttaggtggcatgataagtcccctccactttaacctttacaagaaaagtaattttgaaattaccaaatgaccaatccgctttttgttctctgttcctgttttcctcagtccttttctgtctataaaaccaagttctcctgttcagctcattggaacaaccattatattttatagtatgaggcactgcccaattctatagaatcgcaccttaagtcccagctactccggaggctgaggcagaaggatcacttgaggccaggagttccaggatgcacctgtgatagccatgattgctatgaccgcacctgtgaatagccactgccttccagcctgggcaacattgccagagtccgtctcttaagaaaaaaaaaatctttgaactaagtttgttgtgattttgtcttttgacaaagaagaaagggcaatgtgaattgccccaaatcacagagcgaaatggtagtagtcaggaccaaaacactttcttagccgttttcttagttcttgtacccatctgtttctgtattttcttcaccaggccatccagcagtgtctcttaaagggtagcccgagaaacaactgacttagaaaagcgtggggcacagtctgtctacgcagacccgaggaatctgcattttaacaaactcactgggaaattctcgcgcacgccaaggtttcaaagaccagggtcccgtggcacagtgccgcacagttgtcaaaacaagtgctgtccaattgttttggttttaaattctcactgcgtcatgggaaatgtagtttcgagcctcctctctcccgacgccccagccaatcctccggcgctttacggaacgagccgagtcaatccggaaataaccgagtgttcgtggcgggccctttcctgcccggctgcattctgggaaagggcaatttccgttaggtgctgaaggctgtggcgcgcggctgtccccattcccacgtgaagcgctacgctagcatcgctcggctggcggctcccagctcgccgcggagcagtcccggcagcagcgggggaccggaagtggctcgcggaggctcagaagctagtcccggagcccggcgtgtggcgcctcggagcacggtgacggcgccatgtccctaatctgctccagtgagtgttggctgcggccaagcgcgggtctcaggaggccagagagcggcgcgggagcgtgtgcggtccgctgcggcgcccgggccggggtggaggcgggaatggggcgctccggaggccgagcggcggcctgtcagcaccggagccccccccgtcggagcggggtgcatttgcgcagtgccccgcagtttacatagtgcctgaggtttattgtcgcagacattactgaggccggtcgcctcattctacagagtggaaacaggtctggacagagagagctggtgcaagggaagcagccttaatgtaggagtcagaaaactcgaggtcttgtccagggtccgcctcccattggctttatgaattggctcaaggctctgggcctcggtttcctcatctgcaaaatcgagagcattgcagtggatgttttgcgaggcctcgctcggatagtcggagcttttgcaatttgcaaaggtcacatgatgagttagaggtagaggcaaggctggcagccaggtatctggctcccagccttacactgtatgactaataaaaacagcgcacatttataagcccttattggtttacaacgcgcttccaagtctatgatctcattttatcctcacaagaattccctaaaggagaaataaagatcctggttttgcagatgaggatgcaaggcgcaggaagagcggggcttatctaaggatgcgtagctagtcagtggcagagctgggtgacgtagttaggtgacacggatcttggaccctgaatccatgcttttttcataccttccactatctttccctttgatattttatcatgacgtacagacattttcctttcccttttcgttgtttcatcagattactcgtttcccctcccttttgctattcacttccttctcttctcagaacctgtacattgatccaaagagggggaagaaggaagggaaatgatggaaaaggaatccctcactttgaagaaattacagctcgcaaagtaccttcacatttattgtttccttccaatcttcgggaagctctcttttacgttccccagcaccatccttcctggcatggttcactcatttgttagatgtttaccgagtgccctgggggcatctgcattgtactggaagtgagagaccagctgtaatccttatcctcaaggggtgcacagtctacgcaggcaagagtgtaaatgatacctctattgcgggttgttgtgaagatgaattactgtactgtatgcctagaattgtgcttggcacatagaaatgtgccatgcaaatgtgccatgtaaatatttttaaatatttttattgtagcgattgccactttgctccttggaatcttccaggtgataagtgtctgtacgctaatcagttgactggtagctggtagactcaatagcttcaggatggggactggtcacctaggaagactaaagggtattagaaggttgggattttcagtcctaccccccatttacctggggaaatgagaggaactgaagtcgtcactagtgaccagtgatttattgaatcatgcctttgtaatgaagttttcataaaaatacaaaaggacaggattcaaagagcttctgtatagcagaacatgtgggggttcctggagggtggggtgcccagggaaggcatgggaagctctgtacttctcccatacctcatcctatgcacctcttcatctgtatcctttgtaatatcctttacaataaactggtaaacataagtgtttcccacaattgtttgagtcactgttgcaaattaattgaacccaaaaaggaggtcatgggaaccctgatttacagctggtagatcagaagaacaggtcaaacaacctggggcttgcgattggcatctgaaggggcggggagtctggtgggactgagacctcaacctgtatgatctgacactatctccaggtacctggtgtcagaattgaattggaggacacccagatggtcacatctgaggtcacagaagtattttgttttgtcagagaataggagaaactgagtttgttattcctgtattctcagactttataatttctttgataatctgtctggagctatagactaagatggatggcagggatttgaatggcttcatgtgtatctccatgtcatggagtaaactgtattcatagagtacacaatcattgttcagatatgaggtggtgataatggactgctattctctaggtgcttggcacatagtagttgttaataattatttgttgactatatgattgtcagatagtcaggagactatctcctcagtcaggagactaaaggaaaaggtagttccatagctggaaagcattctggggccagtacagaactggcttagggtcaaatgtcttgctttctgctagttgagtgtgaggatgcctagtcttgttggggctaatagcagatgaggaatcctctaggcccaagattgccttcactccaagctcactaccagccttttctctacagtctctaacgaagtgccggagcacccatgtgtatcccctgtctctaatcatgtttatgagcggcggctcatcgagaagtacattgcggagaatggtaccgaccccatcaacaaccagcctctctccgaggagcagctcatcgacatcaaaggtgcctattggctgccttagtctagggccatcttagctcagagcctgagaggatgggaggtggtgccagtgcactggaggaagagatggtgggctgtttatggctaaaaggaaaagatgtgatggcgggggaggcccctgggttatgttcttcatacctgctttccctttcggcagttgctcacccaatccggcccaagcctccctcagccaccagcatcccggccattctgaaagctttgcaggatgagtgggtgagttcctgcaagagaatcagcatcttccccacttgaagagaatgcattgctgggttaggacttgggggtaggaaggatggagcattatttagagggtaaactttgtgacatcagggatttgttttattcttcgttgtatccccagcactgagagcagcacctggtacatagtaggtgctctagagttatgaattgaatgattgaatacatcctgcaggactgtctggcacagtgcctgacacaacgagggcgatcaataaatagcagcagcagcagtgttgttattctcttttagagaggggacggcatgacagctgggatttgccagtaagttagggaaggtggggatgggaaagagctggctcccactcctgtctgtgtgcccagtggttcgcttggggtaggagctcaagagtgtctgccggcacattcgtgtttgctcggatattgtttgggtcactgatactggtctaggctctgggataggaggcagcatcccctccccaagggctgactccactgggtactccctgcaccccccacctcaccttacaatgatatttgcttctcccaggatgcagtcatgctgcacagcttcactctgcgccagcagctgcagacaacccgccaagagctgtcacacgctctgtaccagcacgatgccgcctgccgtgtcattgcccgtctcaccaaggaagtcactgctgcccgagaaggtgcagcctctcccctgccatcccccaccctgggctggttctgcattgtaatatcccatttctaacatcgtcttttctctcagctctggctaccctgaaaccacaggctggcctcattgtgccccaggctgtgccaagttcccaaccaagtgttgtggtaagtgtcccccttcccttaccagcagcccatttgtgtacagtggcccacagaactgtccttatgcaggtgtctttggtgctctgtgcctctcaccctcacctttcttctcttcagggtgcgggtgagccaatggatttgggtgagctggtgggaatgaccccagagattattcagaaggtaagtcctgctctcacctggtgggagtgctgatgggcccttacttttcaccatctgtctggagtccatcgtgactaaaatcactgtgcttttgggagttgagtggtgcagagcatggaccctgggaccagattgcctgggtttgtattttgatgccactacttgtaagctttatgaccttggcttacttagccaacccttacgtgtctcatttccctagcttctaaactgagaatatgatcatatccactgtataggcaggctgtgggaatttaaaagatttcattactgataagtgcaccttttagctcttattgttattgagattctttgcagatagtaaactacttttatatattttcttgttttttttctatgagggcaataggataggaattataatccttattttgcagatgaaagacacatctgagaggcagagctgggcttcctgattgcaagtccagtgggattctcatttgcagggcttcttagtgtctttctgagcagttcaaattgtcagcatgtgtctgagcccttggcttagtggcgtgtagacctatgggagctctacagtcctagcttctattcttgctctgctgtttatcacctctgcgaccttgggcaattgacttcacttctctgaggctcagtttcctcagctgtaaaataaggtcgtcaacacccccctcataaagctgggatggaagtaagaagagagaatgcctttaagcctgtaacgtagaagttggcagatagcaagttcttggtgctgcttttgaaagcacaggtgtgaccagcatctaatgtacttttctccttgcaagatgatttgtctcacattgagcctgttcttccccagcttcaagacaaagccactgtgctaaccacggagcgcaagaaggtgagttctctttctgaagcctggagaaagagctggcctggtgggaggcggttgactccttaggagagagagggcggctgaatcttggattcattgctgctcttctttgggggcttttcattttctcagagagggaagactgtgcctgaggagctggtgaagccagaagagctcagcaaataccggcaggtggcatcccacgtggtgagtgtctgggtctccactgtcttggagacagccctcccgttttgtttctggggtgggcgggccagcatggggagtgctgagtgcagagctgtcccaggttcctggcgctgttcctggtgctgtttctcgcctgggctgctgagttgtcagggctcctctttctgcccagctgtgggtttcctagtgatgcagtgagggagttaccgtaccaggcagatagccaagaggtatggataaggaatagaagtaactcttgctcccctgagaacatgggtgactggagatggcagtaggggaggtctgtggctttgtggcctgctgtgatttggccgtgacagggtttggtgtgtctctctgcaaaggggttgcacagtgccagcattcctgggatcctggccctggacctctgcccgtccgacaccaacaagatcctcactggtgagagtctgggcctagcccggcaggccaaagtggggaggggcagcagggaaggcgcatgctccttgtcctcttcatgggcatgggaacaaaagcatttccttgagcaaaagggcctgggtgggcctgactcattgtttggtctttttgggtcttctccaggtggggcggataaaaatgtcgttgtgtttgacaaaagttctgaacaaatcctggctaccctcaaaggccataccaagaaggtcaccagcgtggtgtttcacccttcccaggtaaggggttctcctcgccacccttggttcttctttccttggctgttgtttgtccctcaccccgctgctgtctctgtgaagtggggctgggaaagagctctgactctgactcctgagtgggcacttggaggggctcactttggagttgtggagattgcccttcactctgcgtgagaccttctaaagcagtgatcttccagccagggagagaacggaaatgtgtagtttgacaagcatattcattgaaatatttcatattagggaaagaaaaaatcttatagtgttcctaatataaactacagaaaacaaagctcaacacaatctcaactcacacttacgaggaggacagatatatctgctttcccatgatcctccaagatgggtaaaaatcatgttgactgttgaaagtggtgtaggttgtaaacagaacctctggtttacagggtaaaggtaactcatgggaccagattaatgatattatgggattcgaattttaagcctaagacagtttgggtttggggctgcaggacatggttggtttagtgcttcgcagtcaagatttcccttggaccttagggaaatgagaaatataagaataacatggtgaatttttcatgactaaatttgttcaaattgagagcactgttttcttgcttatggggtattaatagttaggtctcatgaaattgtattgataaaaaaagatggtagttatttttaccttatggcttttaatatcctaactaaacaaaaaattggtgagtgacgcgaaattctctccctgccccaaatcttttggaaaattaacttaccctggaaatccataaaagtggaatgcactgaaatacagccatgcagccccttccagtcccagtactgctcagacctgtgccatacagtacagtagcagttagctgcatgtggctatttaaatttcaatgaaatagaataaaaaattcagtccctcaattgtactagctacatttttcctttggtcctggaaatgggaaaattgctctctgttgcagttagcctttttaccactagatggcgaggacgcctccacaagccctgatgctgtatgagttagcactttaatagcgtttaccattggctgtcttgggcaccattgggtggataggtggttccagggagggcagagctgaaaggagaagcaattgttggcagttgtgggcatccccagccccgttttataagattgttttggtctgtatctcttttctgactctgatattctgtctttgttttccttgtaggacctggtgttttctgcttcccccgatgccactatcaggatttggtcggtccccaatgcctcttgtgtacaggtggttcgggcccatgagagtgctgtgacaggcctcagccttcatgccactggcgactatctcctgagctcctccgatgatcaggtgcggtcccagccagtgccctggagaggcctgctggtccccaagcttgaacatcctgggtggcaggaacatcttcccaccccagctggttccccagaacctcaaaggagaatgtttgccagggtttgccaaaccaggggctctgtcttgctgaagggccaccagaacctgggacccactttctcactgactccattgtctctttttttttccccagtactgggctttctctgacatccagacagggcgtgtgctcaccaaggtgacagatgagacctccggctgctgtaagttgcctcataggcactcagcttttttgtttgctgtttattatttatttttacattttatttagtcatttgtttatttgttctaaagatatatttaccatgagcacctgtctagtgcgggctttgtgctgggttcactgaggaatgtgaagaacaaggaacctacctttgctgctcttagtctctctccctggtgggctctgaccacaggtctctcttccctcctccacagctctcacctgtgcacagttccaccctgacggactcatctttggaacaggaaccatggactctcagatcaagatctgggacttgaaggtaggacatggtaggcctccatctgaggcccagggccagagggagtgtttgtgacaatgcagtgctaattaggtgcttgtggcacctggccctgaaggtggagagacactggctgtgcgtgtgtgatatgatggtgtggtctggggggtcccgctggctgtccttcctggaaggacgtgagggacatctcaggtaggagtttggtgagccccattttcttcctctcatgatctgtgggtgacgtattttactacccaccgccactgtaggaacgtactaatgtggccaacttccctggccactcgggccccatcactagcatcgccttctctgagaatggttactacctggctacagcggctgatgactcctctgtcaagctctgggatctgcgcaagcttaagaactttaagactttgcagctggataacaactttgaggtgtgcccttccccctccgcccagctttccattgtgtctccttgtttgtcaattatttattgaattaatctaattgcttctgcttatccgcaactgccccatagtttctgttccccttgtgtgaccttctctctttctatttctggcaggtaaagtcactgatctttgaccagagtggtacctacctggctcttgggggcacggatgtccagatctacatctgcaaacaatggacggagattcttcactttacaggtagaggctggtcctgggctcctgggatctctctaggtgcccaggcccggagggaagcctcactgggttaggaatttctagggcttgcatgaatttacctaagcagctttctgttaccacctgaggcagagctttatgactaaggaagcaactgagtcagactgcatggcagtagatgctagtgcttgttctgccacttccatgccctgtggcattgggcaggttactaaagggagagaaaagtccctctgaagttttgataactgaatctaaaataaatgaacattagacagtgacaggaggagagccattttaattacgtgcatatgcacgggaggcccacattatattagatctgcagaagggtcagatgattgaagcttatacagtttatatatcacttaataatggggatatgttctgagaaatgtcttgttaggtgatatcgtcatgtgcgaccattgtagagtgaacttacatatatctaaatggtgtagcctactacacgccaagactattgctataaccttagtatagtctattattgctcctaggctacaaaccggtacagcatattaaatgtagtgaatacaattataacacaatggtaagtatttgtgtatctaaacaagtgtaaacatagaaaaggttcagtaaaaataaggtataagagatttttttaaaatggtacactggtatagtgcttgccatgaaaggagcttgcaggactggaagttgctttcagtgagtgagttgtgagtgaatgtgaaggcctaggacattactgtacgctgctgtagactttataaacacagtacacttaggttttactaaattcataaaaaactttttcttcagtaataagccttagctgacttttactttataaacttaaaaaaatggattcttttgtaataacgtttaacttaaaactaaaacacattgtacagctgtacaaaaatattgtctctctttacatccttgttctataagcttttttctaatttttttatttttattttttactttttaaacttttcttgttaaaaactaagacacaagcacacattaccctaggcctacacaggatcaggatcaccaactgtattagtccgttctcacactgctatgaagaactgcctgggtaattgataagggaaagaggtttaattgactcacagtgactcgggaggcctcaggaaacttacagtcatagcagcagggaaagcaaacatgtctttctttacatggcaacaggagagacaaatgctgagcaaaggggctaaagcccctcataaaaccatcagatctcgtgagaactcactatcatgagaacagcatgggggtaaccacccccatgattcagttacttcccactggctccctcccacaacacgtggggattatgggcactacaattcaagatgagatttgggtggcggcacaaagcctaaccatagcaccaacatcactgtcttctacctccacatcttttcccaccggaaggtcttcgggggcaccaacatgcataaacctgtcatctcctatgatgataatgccttcttctcggatacctcctgaaagggcctgcttggtgctgttttacagttaacttttttttataagtgggaagagtatatttaataccaaaaaaagtatagtataggcataccttgtcttattgcacttagctttattgtattttatggatactttgctttttataaattgaaggtttttggcaaccttgccccaagcaagtctgtcagtaccatttttccaacaacatgtgttcactttgtgtctgtgtgtcaaattttggtaattcttacagtatttcaaacttcttcatgatttattgtgtccgttagtgatctttgatgttgctattgtaattgttgggcgggggggcaccatgaaatgtgcccataaaagttactgaatttatttgataaatgaaatgctgtgtgtgttctgaccactccacccaccagccgttccccatctctctccctctcagacttccctatttccttagacacaacaatattgaaactaggccagttaataaccgtattatggcctctcggtgtccaagtgaaagaaagtgtcccatgtctgttacttaaaatccaaagctagaaatgattgagcttagtgaagaaggcatgtgaaaagccaaataggccaaaagctaggcctcaacaccaaatattagtcaagttatgaaagcaaaggaaaattcttgaaggaaattaaaagtgctactccagtgaacgcacaaatgataagaaagcagaacatccttattgctgatatggagaaagtttcagtggtctggatagaatatcaaaccagccacaacattcttttaagccaaaccataatccagaccaagatcctaactcttgaattctgtgaaggctgagacaggtgaggaagctacaaaagaaaagtttgaagctagcagaggttggttcatgaggtttaaggaaagaagccatctccataacagaaaagtacaaggtgaagcagcagatgctgttgtagaagctgcagcaagttatccggaagacctagctaagatcattgacggtgggtacactcaacaacagattttcaatgtagacggaatagccttctattggaagaaagtgacatctggaacttgcacagctagagagaagtcaatgcctggtttccaagatgcaaagatcagagtgattcccttgttagggactaatgcagctggtgattttacattgaagccaaagctcatttagcattctgaaaattgtagggcccttaagaaggtggggctaaatctactctgcctgtgctctgtaaatagaacaacaaagtctggatgacaacacatctgtttacagcatggtttactgaatattttttaagccccccattaagaggtactgttcagaaaaatagattcctttcaaaatattacagtgcacctcattaccctaaagctcagatggagatgtttcatgcctgcaacatccaatcttcggcttatggatcaaggagtaattttgactttcaagtcttattacttaagaaatacattttataaagctatagctgccctggatagtggttcctttgatggatctggacaaagtaaattgaaaacctggaaaggattcaccattctacacgcccttaagaacatttgtgattcatgggaggaggttaaactatgaacataaagaggagtttggaagaaattgattccaacccttcagccctcatggatgactttgagggattgaggacttccatggagggagtaactgcagatgtggaggaaatggtaagagaattagaatccaaaggggagtctaaagatgggactgaattgctgcaatctcatgttaaaactttaatggatgaggagctcttagggatgaccaaagaaagtggtttcttgatggaatcttctactggtgaagatgccgtgaacattgttgaaatgataatgaaggatttagaatattacataaacttaattgataaagcaggtgcagaatttgagaggattgattccagttctgaaagttctactgtgggtaaaatgctatcaaacagcatccatcacagagaaatcttttgtcaaaggaagaatcaaatgatgtggcaaacttctttgttgtcttattttaagaaattgtcacagccacttcagccttcagcaaacaccacccttgtcagttagcagccatcgacatcaaggcaagaccctgctggtgggtcttggaaaaagatgacaactcactgaagtgtctgatggttgttagcatgttttagcaataaagtatttttgattaaggtatgtacattgtttactagacataatgttattacacacttaatagactacagtatagtgtaaacataacatttttttttgagatggagtcttgctctgtcgcctaggctggagtgcagtggcacgatcttggctcaatgcaacctccacctcccaggttctagcacaggtgggcaccatcacacccggctaatttttgtatttttagtagagacggggtttccccatgttggccaggctggtcttgaattcctgaactcaagcgatccacctgcctcggcctcccaaagtgctgggattacaggcatgaaccaccatgcctggccaacataacttttatatgtagtgagaaaccaaaaaaatttgtgtgccttgccttattgcaatatttgctttattggtagcctggagctgaaccagcgatgtccctgagatatgtctgtacataaaccagtaacgtactgtacctaattatgttatactttttttttttttgagattgagtcttgctctgtcacccaggctggagtgcaatggcatggtcttggctcactgcaacctccgcctcctgggttcaagtgattctcctgcctcagcctcccgagtagctgggacttcaggcgtgtgccaccacatctggctaatttttttttttttgtacttgtatttgtagtagagatgaggtttcactatgttggccaggctgatctcaaactcctgacctcgtgatctgcccacctcggcctcccaaagtgctgggattacaggcgtgagccaccgcgcctagctatattatacttttatacaactggcagtgtagtagatttgtttatacctgtatccccacaaacgtgaataatgcattgcattgtgacatgatgatggttatgacatcacttggtgataggaatttttcagctccactgtaatcttatgggaccagtgtttgtgtggtccgtcgctgacatgtcattatgtgacacatgactctatggcatcctgaactgcagaagggagtaggggcctaaggcttctagggggtggtggtgacacaagttatgtggggggatggggaggaagtgcactacagagtctctcaggtaataaaagttgtctcagagcagaccttagataaataatgcatgacagtctgtgacaaagactggcatctagtcttctctcttgtgagaccagttcattttccctggttgagattcccaggaaggggattcatgatgttcctttcagatgacctgcccttagagaaagaggggcaagagacaggagggcaggacatggtcagagagaccttggttcaaagccctcagcgtgccaaaccaccatactttggggtattgttttctgagatccaatattacttaacctctcagaaaagtgggaatggtaactatagactcagtggggttgttgaggtttagatgaaaatacatacaggtgctccttgatatacgatggagccacatcctgataagtgcatcataagctgaaaatattgcaagttgaaccatggtaaatcggggaccgtctgtgaatacataggtcagaacggtgtctggcacgtagtcaggatttgcagttgttctcactcagcattgggtcttagtctgtggtgggatagagcagtgaataaaacagacccgatttgggcactgatgtaatttatagtcaggttagtaaggcagatgtagattaatttcacatgtacacatttaattgcaattataagtgctagagaagaaaagcatgagatgctgagagaatgggtaacagggtttctaacctaacagttatgtggccctgggtacgtgactttccctttcagatcttgaactccttcatctagaaaatgggaatattggcacagctttgcagggtgtgacagctggtgttgtggagatggcatgctaatatgctggtaacagggtgcctgatgctcacttaagatgctacatgaatgggagctactgctgtgtgtgttgatgaaattctcgtcctcattagcaggttgtgagcaggatacaagatatttcttcttgccccgtattctcctgagccctgctcagtgtgtttgtataacaaaggtgtccatcctaacaatatggctcaccggttttcaccctgtactgtacctggtgttttgatttagaaccgagttaggtagctgaaaatacagcgtgagctttttaatggggagttggttgactccaggtgtgatcctaaatctagaaggaatttggccagatgttcatgaatttctggagtcccatgaggaatgttgcccagcctcatctgcctcttatctggtcctgctctgtgttaggggcctgagtgccctggggttggaacactatgagctagaaaatgctgatggactgttccacttacgagcaagtagtgagcactaggcataaacaagctgagctctgaggtttttcaactaaacctagccgaactgcagttgcccagaaagctcaggtgagaagggggggctggcattgctttattcattcatcccaccagtgaaaaatgccaggcactgagggaggcactgggggtagtgtgcaggtcagcctagggaaaacaaacaggagcctgcggtgtgataaatactaattagagaaggcctggttgtttgggaatctgttattagggatcagtgttcagactaaaggaggaaaagccttctcacagttgcctcttatctttctcctcagagcatagcggcctgaccacaggggtggccttcgggcatcacgccaagttcatcgcttcaacaggcatggacagaagcctcaagttctacagcctgtaggccctggcccttctgatggaagctgggcctcatctcagtagaggggtagaattagggtttggggggggggtggggggaatctatggggggagggggctctgtggggtgggacattcacatcatttcactctggtctgagtggtggcctgagaaccatggtggcatggaccaccctcatccatgcaactccaggccccatgggaacggatgtggaaggaagaactgtcaccctcttaaggcccagggtcggagcccagggcctctcccttcctgtcgttcaatggacgtggtggtggctgttccacacccattttgttgcagttcctgtgagacaggagaggctgagccaagggaactgtgaaggggatgggcaggagggcttgtgcagggttttgtaagcagtgatctagtttcattaaaaaaagaaaacaataaccataaccacctccccgtgtctgtctgcaccaggagcacctgggactgggaaggtcaaggggagggagcacacactgggacactggcttccgggaagcccatcttcctttcctttcacagctcttacccttttttttttttttttaattgcacagcagaaataaaaacaaatctgcagatgaaatttgccatgtccctgcggttcttgaccttgtgtctaaaggcctcaagtcactagtcctgccacttgccttgtagacttggtttcctacacaagcctggaagggagggagacctgcagggaagattagctggatcttgctggtggggaggtctgagcatctccatcagggttctttagttgtaggctttctagcctgtcctcagctggcataagtcaaaaaggagatttttttattgactctggcgattgaaaagctgtggtaggactggtttcgggacaaagatctgataatgaatgtgccttatagggaattcctgtagggtcacgtgactgctttagattgcaggtcaggaaaggcctctgaagtggtggtgatgaagctgaagctggaatgagagggacctgagaggggaggagtgttggcaggcagagagcaggttctagggctggactgagcgagatatatggaggaacaggaaggaggtcatggtggcaaagtcgggggaaccatggtgtacagtctggggtgattgacagtcccctgacaagggccatcccagtggaaggtcggggctggctgcctccctggagtggggtaagaggatatgaggtgaggaagtgtgggagtcagtgattatagacaaaaaatagtgctgagaaggggagctgagaaatggggtgttaccaggaggggagctttgggggcaaagtatggtaggccatattgtggacataacaggagacctccaggcatgttttgctggggcagtgttctgttgtcagggaagctcggcatgccgtatctgcctgggagggtcaggatgcctactagctagggaaagctgaaaaaccccacagtaaagaaaccacttaacttatacaagttgaatataaaccatttaacttacaccagtgtttattattaagaaaagacctgggccaggtgcggtggctcacgcctgtaatctcagcacttccagaggccaaggcgggcggatcacgagatcaagagttcgagaccggcctggccaagaaggtgaaaccccatctctactaagaatacaaaaattagctgagcatggtggcaggttcctgtaatcccagctactcgggaggctgagacaggagaattgcttgaacccaggaggtggaggttgcagtgagctgggattgtgccactgcactccagcctgggggacagagcaagactccgtcttggggaagaaaaaaaaaaaagaccaatcatacagttctcccaaggcaggacatactttaaaaaaaagttaggacaactgcctagttaaaaggtgggctaacaacagctatggtttgcagatggtagaatgggtcactcgagtgggagagggttgaggtcgaactcccgacctcaggtcatccgccagcctcagcctccgaaagtcctgagattataggcgtgagccaccacgcccagccactcatttaattcttaaaacaactttgcccttggccgggtgtggtggctcatgcctgtaatcccagcactttgggaggccgaggtgggtggattgcctgaggtcaggagatggagaccatcctggccaacatggtgaaaccccatctctactaaaaatacaaaaaattagctgggtgtgatggtgcatgcctgtagtcccagctgcttgggaggctgaggcaggagaatcgcttgaacccgggaggcagaggttgcggtgagctgagattgtgccactgcactccagcctagtgacagagcgagactctgtctcagaaaaaagaaaacaaccttgctctttgctgtccagcaactcagcagattcttggtccctgcataggacttcataccgctcttcctttgcagaacggagcagaaggtgggagcatagtcctggcactggactctctggctttgaatcccagttctggcacttagttgctgcaagaccttggacagattatttaacttttttctgtttgagtttcttcatccaaaagatggggatagtgtacttactagagatatagtaaggattaagtgaatgtgacaagtgcttagaataggaattgcacatcataaatgctgctactattaactattaccactctcctgctccctctccctggagtctgccctccccagagatagaccaagtccttcaggaagcctctggagcccattgctgccctgccaggtgagtgagctttcttggagcccatggttcatgcctttagcatagctctgtgttaccttgaaggtgtttgcgcatttgtctttcccacttagaatcttaagagcagaaccaggtatccgttgctatcattcatctcttcagctcatgtcacactgctgccaagtggcagattgagagattcaaccttggggctcagtccaatgcccaggcaacgtctgtctctttctttgataagtaaacacagagggcttgacagaatgttagttatatcagccaaaatgaatgaagagctatcacctcctgccacagctcaccagatgttggcccagctgccttgtaggtgaaccttctggaagtagatcttggttgggggttggtggattctaaaggactcacctctgttgtctagctagtgagttttgtatttaggacccagcagcagtcagtagtcccaggtgtccatagggaaattgttcggtgatattatcagtgattactgcatcttttgtgcacttgggcctttggtgatcaaaccctgcttagcctccgctattgaaagtgaggaagcatctatattgttcctgagcttggagcactaaccaaggaggtcacctgggggcagtgtagtcacagcagtctccccagtaacgttggtactgtgatggagctcctcacagtaccacagaatgaccctgccagacaggtggtggtgtccccagtctatagatgagaagacaagctcagagaagtgccttgtttaggccacccagtaaataacgcagctagggtttttaagccgtgtggcttcagagaccaagctgattaagataggcatgggcagctaatgacccactgctcagctttgcaggaggtagtatcatagttaaatgcaggctctggagccagcagcccaggtttgaatcccagctctgcacctttctgtgatgtgcatctttatgtctcagtttcttcatctgaaaagtcagttcctggtgcctacttcgtagggctcttgagaatttttatttttagttttatttatttatttttttaaatagcatttctaatagaatctaaacattgattggtctgacaggtcttctgtgtggcatttttttgtgtgttaaatttcttagtgtttttttaaattattatactttaacttctagggtacatgtgcacaacatgcaggtttgttacatatgtatgcatgtgccatgttggtgtgttaactcgttaactcgtcatttacattaggtatatctcctcatgctatgcctcccacctccgcccaccccaggacaggccctggtgtgtgatgttccccaccctgtgtctaagtgttctcattgttcaattcctacctgtgagtgagaacatgcggtgtttggttttctgtccatgcgatagtttgctcagaatgatggtttccagcttcatccatgtccctataaaggacatgaactcattcttttttatggctgtgtagtattccatggtgtatatgtgccacattttcttaatccagtctatcactgatggacatttgggttggttccaagtctttgctattgtgaatagtgccacaataaacatatgtgtgcatgtgtctttatagaagcatgatttataatactttgggtatatacccagtaatgggatggctgggtcaaatgggatttctagctctagatccttgaggaatcgccacactgtcttccacaatggttgaactagtttacagtcccaccaacagtgtaaaagtgttcctatttctccacatcctctccagcacctgttgtttcctgacttcttaatgatcgccattctaaccggtgtgagatggtatctcactgtggttttgattttcatttctccgatggccagtgatgagcattttttcatgtctgttggctgcataaatatcttcttttgagaagtgtctgttcatatcctttgcccactttctgatggggtcgtttgatttttttcttataaatttgtttaagttctttgtagattctgaatattagccctttgtcagatgggtagattgtaaaaattttctcccattttgtaggttgcctgttcactctgatggtagtttctgttgctgtgctgaagctctttagtttatttagatcccatttgtcaattttggcttttgttgccattgcttttggtgttttagtcatgaagtccttgcccatgcctaggtcctgaatggtattgcctaggttttcttctagggtttttatggttttaggtctaacatttaagtctttaatccatcttgaattaatttttgtgtaaggtttaaggaagggatccagtttcagctttctacatatggctagctagttttcccagcaccatttattaaatagggaatcctttccccatttcttgtttttatcaggtttgtcaaagatcagatggttgtagatgtgtggtattatttctgagggctctgttctgttccattggtccatatctctgttttggtaccagtaccatgctgttttggttactgtagccttgtagtgtagtttgaagtcaggtagcatgatgcctccagctttgttcttttggcttaggattgtcttggcaacgtgggctcttttttggttccatatgaactttaaagtagttttttccaattctgtgaagaaagtcattggtagcttgatggggattgcattgaatctataaattaccttgggcagtatggccattttcatgatattgattcttcctatccatgagcatagaatgttcttccatttgtttgtgtcctcttttattttgttgagcagtggtttgtagttcttgaagaggtccttcacatcccttgtaagttggattcctaggtattctattccctttgaagcaattctgaatgggagttcactcatgatttggcctgttattggtatataggaatgcttgtgatttttgcacattgattttgtatcctgagactttgctgaagttgcttatcagcttaaggagattttgggtggagacgatggggttttctaaatatacaatcatgtcatctgcaaacagggacaatttgacttcctcttttcctaattgaatacgctttatttctttctcttgcctgattgtcctggccagaacttccaacactgtgttgaataggagtggtaagagagggcatccctgtcttgtgccagttttcaaagggaatgcttccagtttttgcccattcggtatgatattggctgtgggtttgtcataaataactctgattattttgagatacatcccatcaatacctagtctagggctgggcgcggtggcttacgcctgtaatcccagcactttgggaggctgaggcaggcggatcacaaggttaggacatcgagaccatcctggctaacacagtgaaaccccatctctactaaaaatacaaaaaattagccgggcgtggtggcgggcgcctgtagtcccagctactcaggaggctgaggcaggagaatggtgtgaacccgggaggcagagcttgcagtgagcagaaatcgtgccactgcactccagcctgggcgacagagcaagactccttctcaaaaaaacaaaatgaaacaaaacaaaagaaatacctagtctattgaaagtttttagcatgaagggctgttgaattttgtcgaaggccttttctgcatctattgagattatcatgtggtttttgtcattggttctgtttatgtgatggattatgtttattgatttgcgtatgttgaaccagccttgcatcccagtgatgaagccaacttgattgtggtggataagctttttgatgtgctgctggattcagtttgccagtattttattgaggatttttgcatcgatgttcatttggggatattggtctaaaattctccttttttgttgtatttctgccaggctttggtatcaggatgacgctggcctcataaaatgagttagggaggagtccctctttttctattgattggaatagtttcagaaggaatggtaccagctcctctttgtacctctggtagaatttggctgtgaatccgtctggtcctggactttttctggatggtaggctattgttgcctcaatttcagagcctattgttggtctattcagggattcaacttcttcctggtttagtcttgggagggtgtatgtgttgaggagtttatccatttcttctagattttctagtttatttgcatggaggtgtttatagtgttctctgatggtagtttgtatttctgtgggatcggtgttgatatcccatttatcattttttattgcatctatttgattcttctatcttttcttctttattagtcttgctagcagtctatcaattttgttgatcttttcaaaaaatcagctcctggattcattgattttttgaagggtttttcgtgtttctatctccttcagttctgctctgatcttagttatttcttgccttctgctagcttttgaatgtgtttgctcttgcttctctagttcttttaattgtgatgttagggtgtcaattttagatctttcctgctttctcttgtgggcatttagtgctataaatttccttctatgtactgctttaaatgtgtcccagagattctggtatgttgtgtctttgttctcattggtttcaaagaacatctttctttctgccttcattttgttatgtacccagtagtcattcaggagcaggttgttcagtttccatgtagctgagcgattttgagtgagtttcttaatcctgagttctagtttgattgcactgtggtctgagagacagtttgttacaatttctgttcttttacatttgctgaggagtgctttacttccaactatgtggtcagttttggaataagtgcgatgtggtgctgagaagaatgtgtgttctgttgatttggggtagagagtttggtagatgtctattaggtctgctcggtgcagagctgagttcaagtcctggatatccttgttaactttctgtctcattgatctgtctaatgttgacagtggggtgttaaagtctcccattattattgtgtgggagtctaaatctctttgtaggtctttaagggcttgctttatgaatctggatgctcctgtattgggtgcatatatatttaggatagttagctcttcttgttgaattgatccctttaccattatgtaatggccttctttgtctcttttgatctttgttggtttaaagtctgttttatcagaaactaggattgcaactcctgctttttttttgctttccatttgcttggtagatcttcctccatccctttatgttgagcctatgtgtgtctctgcacgtgagatgggtttcctgaatacagcacactgatgggtcttgactctttatccagtttgccagtctgtgtcttttaatgggagcatttagcccatttacatttaaggttaatatttttatgtgtgaatttgatcctgtcattatgatcttagctggttattttgctcgttagttgatgcggtttcttcctagcatcaatggtctttacaatttgacatgtttttgcagtggcttgtaccggttgttcctttccatgtttattgcttccttcaggagctcttgtaaggcaggcctggtggtgacaaaatctctcagcatttgtttgtctgtaaaggattttatttctccttcacttatgaagcttagtttggctggatatgaaattctgggttgtaaattcttttctttaagaatgttgaatattggcccccactctcttctggcttgtagagtttctgccgagagacctgctcttagtctgatgggcttccctttgtgggtaacccgacctttctctctggctgcccttaatattttctccttcatttcaactttggtgaatctgacaattatgtgtcttggagttgctcttcttgaggagtatctttgtggtgttctctgtatttcctgaatttgaatgttggcctgccttgctaggctggggaagttctcctggataatatcctgaagagtgttttccaacttggttccattctccctgtcattttcaggtacaccaatcagacgtagatttggtcttttcatatagtcctatatttcttggaggctttgtttgtttctttttactcttttttctctaaacttctcttcttgcttcatttcattcatttgatcttccatcactgataccctttctttcacttgatcaaatcagctactgaagcttgtgcatgcgtcatgtagttcttgtgccatggtttttagctccatcaggtcatttaaggacttctctacactgtttattctagttagccattcgtctaatcttttctcaaggttttagcttctttgcgatgggctcgaacatcctcctttagctcggagaagtttgttattaccgatcgtctgaagccgccttctctcaactcgtcaaagtcattctctatccagctttgttccgttgctggcgaggagctgcgttccttgggaggggaagaggagctctgatttttataattttcagcttttctgctctggtttatccccatctttgtggttttatctacctttggtctttgatgatggggacgtacagatggagttttggtgtggatgtcctttctgtttgttagttttccttctaacagtcaggaccctcagctgcaggtctgttggagtttgctggaggtccactccagaccctgtttgcctgggtatcacagcagaggctgcagaacagcaaatattgcagaatggcaaatgttgctgcctgatccttcctctggaagcttcgtctcagaggggcacccggtcgtatgaggtgtcagttggcccctattgggaggtgtctcccagttaggctactcgggggtcagggacccacttgaggaggcagtctgtccgttctcagatctcaaactccgtgctgggagacccactactctcttcaaagctgtcagacagggacgtttaagtctgcagaagtttctgttgccttttgttccagggctcttgagaattaagtgaactgtttcatgtagagatgaggcactcagtaaatgttgactaccgtgcatcttccgtgctctgcctgcactggcattgtccttgagatttaactgtattgacacatgtcgccaaggtcatggtggtccctgacacttgacacctatcgaataaaggcatggtctgactgccttctctgctgcattagtaaacctaaggctctgttgacacaaagcggctggaacataatccaggcacggagacaagagtcaacagagcaatacagacatgatgctagagttctgatagagctgccagcacagaggacaggatgtgcaactgtttaggatgtcaggtggacctaggggaggtggcacagccgcgttttgaagtggaagttccttaggtggacataggacagaggaacagagtaggggtgtctggtgtgagcaaaggtactggcagccccactgcctggggaaggagtgagaaagcaggtttgagggaacaggcagctggggagggaggagcagcactgtggttggagacaggcccagcagattgtagtaaggcaggccaggaggttaaaagttttctgaaatattcacccaaagtgtctaaaaatgtacctgtacagtttaaagaatagtaaacatctttgtgtccaccagccagctgaagaaagcattaggggccatcagtgtgttcctcaatgaatgcatcgctccctgcccctgcagagaaaaccactaccctgaaattggtgctgatcattcgtttgtttttctatacaattttactactacattggggttttggggactgatttttgagctttatataaatgaagtcattcaatctagtttctttgatttcaccttctcagcatcgtccttgagatttacctgtatttacacacatggccctagttcattcactactgggaaaacaaaggaaaatggccaaacagaactcacaccaggtactgtgacagcatttattgaaggtaggagcagcagcagatgtgccggtcctgtgtggcccattcattctaggacagtgcacgctgggagagggatcctggccattgggctatggggcttttaagctgcatgattaggaagcacagctcctcctcctgctgtgatcaaggctctagggtctgagttttgctgttgcagttatttgatgtggtcagccagcagcaggatttactgcagtgtgttcgtggctggagaagcatcagcccttcctctgatgtgattaaagggctggggtccaaaccttgtaattgatcagtgtcttaggcacttagcaatggccagattccatggaaccttgtaaggggccaactcctttcctgggaggccagcctgccagggacaaacaggttaactcttacctctcattcatcgtagaatttgattgtaggaatataccggagtgtatttatatgttctagtgttcatgatggacatatgggttgtttctagttttttatttttattttgctattacagtgtttctgtgaacattctggtgcaagggtttttctgggatagttaggagaggacttatatattagggaatgacaatttttcaacataggtataccagtttatattctaattaacattggtagaatgttcctgtcctcataccctcaccaatgcttattttctggctttttaatttttgccactctggtgggtgtataatattatcttcaagtttaatttttcacattcatgattactgttgaagttgagcatcttttcagccacttacagaccatgtgagtttttcctcttgtgaaatgcctgttagtgtcgtttgcctatttttctatttgtgttacctttttcttgatttgtagcagttttaaacatatttttggatagtaatcctttgtcaagaatgtattgcaactatcttctcactttgtgccctgacttttcactgtgtgttgttatcttgtgacttattgtgaggtgttcatcttgtttgcaacttgatctgtcataattctctgaggctttggctgaaatcacctttcagacaggacctgcatttgcttcttcctgaagcctggggatcactttaaattaaatttagcccttgaggtttgttcctagattgaacctgaggggttctttctcttctctccttcagtctgaggatttgactgcacacaccagagaagaaggaattacacttttcattctcaaggtgatttttttttttttcaatacatcctgccccatgataaaaataggcaggattccttgctgcccacttttgccagaggcttgtttctccttcactcttgcactgaggactgggacctctgaagttccagctttagaggaggccctgcatctggacttgttgcctttgtaggctccgggcttgatctacagttccctggactcatcaaagcagaaggccaaggtctccagagtcctgtagaacttcccagaatagaagctgattttacttcccagagtttttgctttttatttttggcctatctgcacgcctcattccccatgttaattcaacactagtctaagaatattttaaaatatttataatctggtattttagttgtttacttcaggttgatccaagtatctagtgttcctactgctggaacagaagtggcacttttccatgaaatgttctcacataagtgtccagacagggagttgaattcagctgaactaacaggcggtgaagtattctgtcccctttattaaaaacaaagcaccatgaagttaatttgctctcaatgtataatgtaagtatatggaagctggtgggggcctggggaatggaaagacaggggattcccttaggtcttatatagatatagccacagcctctgcccccatccccatccccacctccccaaaagggcaggaagagacaaaacctgacgggccctgagcagctctgcttcctgccacaggtcagagacagtggttattgtccccatcgggtctgatgaattgttctcaaggtccagcaggggcctgctcacatcaggaggcagtaagaagggaggaagaaagctttaaattgggcaaaatttagactaaattttgttatctaggaaagccaaagtttagattgcttcccccgagagaaagctagcactgcagtgaacttcattgttcatatagtttgtatatttgtttcagtaaacagactcctttgacatggaattgttgacaaaatctatgcacaatttatcagttgccaaaatcatgtacctatatacacttggaagtaggagatacacaattgcattgttactggaatatcacaataaagcaaatggatacttggatgattatataggataggggaaagtctttgccatactcaaaaatacaaatatgagagggaaaaattcattgttacataatcctttctaagataaaagaacccggcagagaaaagccaatggccaattagatggaaaatttataaaatgaggatactggccccttgatttgtgaaagctctttacagatgaggagagaaatagtggagagtagataaaagacatgaagggtaacctatgcgataccaatggctagaaagatgcttgacttctaatcaaaaagagccccttcaaaacggccaatgccatttgccttatgatgctcagataggcaaagatttagagtgttactggcctgtggtggcaagcctgcacagtgggattgggtggggagacactcagacagtcccgagtcccacagtcataagaggtgtggtcttgacccagcagttctaagactgtctttcaagaaaatagtatacaaagaactatatgcttaagtaattgtgttcaacactcgtcatccttaacccacttggtctctatcaacagatcaaatatcatagttcaaccgcagtttagagactacctctatttgaaatgataggaaatgacacaagacatccacccttgtgttaaagcaaattcagttacacagcattattccaattggtacctctggaagtttgaaatccttacatgagcttgtatgatggagggaggggaaggaggaggagttaatgctggaaggaaccagaacccaggcccctaagaccaagtcaacctggcttctccaaccagccaagctaagaatcctcacctatatcacactgaccctgcaggatatatcctgtgtctccctgtacaagccaggaagttgggcagggcaagactggccgttgctagccatagatgggaagacaggcccagagaagggaagtcacttagcttccatggcaaatgtttgggccttcctgccttttatgttctccctctagctagaagagtcaaaagacagcagtttcccctagcccctcttcgtattggcctgtaaacttgtacatacaaaaccaaaccaaaacattgacaacaaaaactaagtaagcattaggcttggggcaagaggaaatgcaattctagtcagtagttaatagcacccagttactgttggccgttatgtactattctaagcattcttatctgttaactcattttacccaatacttctatgggaatagacattaacctcattttacagatgagaaatctgaggcccagggaagttgagtaacttactgaatatcacacagctagtaagaagccagctctggggtccacatgcttgtccagtattctgaagacaggaaaggctgagtaggccagagctggatgagtagggggtacatgcagtattaaggccacaggcatgacttgagtacctcagctcctcttgtaacagctctctaagctcgtgctctacctgaagtccggaaaggtgtctgaaaccaagttcaggcttccctaccagattcttctccctgtcccattgaggccaaaccctagcatcctgtccccttctccacctagaggattgacatgtctagaaagggctttgctgccaagtcagagatgaaggcccatgccatacatgggcaaactgggctcagcggcatagccagcactggcacagacctgtctggtggccatgcccaccatcgcagccagtgtcagggccagcaggctgccattcctcctgtgccagcccttcccacatggatagtcttgggaggccaggggaagggatgggaggctgtggtcagaaatgcagcctttagcggtaggctggcaggctcagggggtctgtgaagtgctccttcaactcagtcttagagtaacccttatccatgacagcagctgctcagggtgctttgaggatgcccttgtcagaacttctgtgtctgtgaggaggtgacaagccttcacaagccattcattcctgccaggggcccagttcccagctgttggtgttctttgactgtcaatgtcttaacctccagtatctttgtcctgtttgctctgcctgaaatgccaccgttccttgtggagaggcagaggctcccgagttgagccttgggggacattggcctctgtgcagggtgtggcatatatgaagtatttgtaatcaacgtcacagttttggaaggacagagctgacttggaggaagtttctcacataagaaatagttctgttctagtcgtcacaaataacttctccacacctggtttcagtaggtttgaaatgattgtttattgggcccattcactgtctgttgctttcccagagcttctgggcccaggtctggctcaggcccacaaagacaccaaacccaaggaccagggcaacagctggcagcaaaaggaccgcccaaaggagaggtctcaggctggagttcccattggagtctgtcagagagacgggattggcagggctgggtgaggcccctccaaccctcccctccaccccagaactttgtatcacactgggcagagctgaagctgcctttctgcagatgaggtggactgtgtctgtcttcacttagttccccactgactgcagtgacaccatctcttgccctcagctatggctggagcatccctgttttgtcagcacaatcttgggggctgagagtgggtaaggcctgaggggcccacccagaagccctcctacctgtgggcccaagtgtgggctcctgcccataagaatcctcaaagcccactggccccggagagctcacgatgtcctggggcctggcagtgtcattacggtgacctgaggatcgtcgctgtcctgcccaggggaagaatgaaatcttgggctggtctcctgcccctgtggcccagaggccaggcacaggcctgaagatgtataaaggaacaaataccactcgcaacccagactcacttgtagtgccagtgctacatgcagtggagcaagtctccagccctgaggtgtggcaggcagaggtgctgcagaacaagtaaacctggtggaaggagaagaacatcaaagtggctggctcagtgccaccgggcaggaagcacaaagggaaggacatggaatccccgagctgggccaagtctaggctgctgctagccaggcagggagaaatctgagctgcttgaccaagatgatgactgctgcccatgctgagggagtgcagagctgaatgtgttccttccagatttgaaatccacaccttccttgctccccaaggtccaagtctgcagtggagtgccctgcaggcggggaccaccgcacttcgtaatgccccagtccttggcgggcctgcttcaccaatgctgcctctggctgcacagcccctgggagggctggctctctcccttccacctgccctactgagggagacagcaaattccaaggaggtgggacttggccaggcagcaggataatagatgtttgccctccctttgtgacccctggagaccagtgactgggggcagaggggagggcagattaccaccgcttccagatacagaagggcaggggcagtgccctacgggaccagaagcaggaggagctgacccaacccagcacccaggaggccccactcatgggcagcacacagcagagatgagaacgaagccacactaaccagtgcttccaagtgaaatcagtctacatctgacataataacaggcagtgatttaagaatctagagatttgggtatgtgatgtgaaagatacgttgttcaatgggacaagtgcatctgtcacctctgaggccatctgtatattacataggagacctaaatataccctgagtttatctacctttaccttctggagaagttgctgagttaaagaaaattcaaagaattacatggaacacattatcatttctggaatcagaagtgaggtgaggccaccctagaacaccatgaccagagttcagatttagggctgattgcagcacaggcagcattttccttcctcctggtggtggttatgggttaccttcttgctgacccgaagcccgctgctttccatgacacctggtagacgccaagccccatcccagaactttgtccatataagttcacagggtgccagagggatttggcgaccagctcctcccacttaacagatgggaccaggcatgcggcagccggggcttcttaccagtcctctgagggctctctgggagcctgagtccaggagggcgaaggtagcaacagtgaatcgctggtagtgcgactggaaaggtgtggccccgtccaaggctaccatttgggttctgtagctgtcgcccttgaaagggcatctgagaagagaagtcagagaggctgtttacaggaggcagagcaggtggggggagtgtgggggcactcacccgtctgacaggatgggccactggggctgctggaaggggttggcactgggagcgccccagcactggtgcagcagcaggaccaggttggggtctgtcctctgcagaagccggacctccacatggactggttctcggagcagcctcacgatgggatagtcatcctccccatagtacgagctgaaggtctcgtctgcagggagagtgactcatgagccagggcgggctgtgcatcagggaagtgggggccagaagagagcagggatagcatagcatacctttggcaatccgcagctcaagccgcagggggccgggctgggtcataggagcaggcgatgggggtgggaaaatggatgcctgaatgggcaggaagtcactggcgttgaagacacagcgcacatgaagcctgaagtccacgtgcaagagggtgggggagaagacacagaatcagagcatcctgtttacgtaataaactaggcaccaactccgtgggtgcaacaaatagggtactgtccagcagggcagatggatgctacttaagcaatactcagcatttccaaggcaggctcaggaagctcaccctgcccattcctctgcccacctggtctccctgggatggctcaagcctgttatgccaggccctgcacctggtgggagaatacagcaggatagagatgggccctcggggggctggcaccttgttgggtctgccctggctacccacagctgcctgctgtgccgttcgaggcccctggagcctgacagttgaggctggtgaatgagcctaggtgctctgcctcccgacagacctggatttgagtcttcttagcatttacaggctttgggaccacaagcaagtcttctaacctaagcctcagtgtcctcatttgtaaaatggctgtgactgcctccctttgagggcactgagactgagtgagatcacaagataatgcacctgtgtcttcattgtccttgtagttgcagctggtttgccacagcctaaaggccacagtgtctagcatcttcctcactagcctaagggccatggtggccactcctccacactctggtggggccaacaccctcctagcaccccagaggcctggtaccaaggagatgctgagtaggtataggaggctcacccctgttctgaaggccttgtgtctgaggagctctctggcctagtcctgctggctacagctgtttccccctgacttctgcctccctctgagaatccctaggcactctgttgacctctggctgactcccagagctcttacatcagagagtctaaaggcatgacacagacttgtcctccaccacttggccataagaacatatgggtttttttaaattaaaataaaaaatagaaatggggtctcgctgtgttgcccaggctagtcttgaacttccagcaattctcccacctaggcctcccaaagcgctggtatcataggcgtgagctaccacctctgtgctacttagagctttaaagccaaatacatttgaactgtgacacagtcccctgctccccaaccctcacggcagggcgggaaggggaaggagatgcccagcaaccatgcagtgtcaagcacaagatttctacaacccattggctccgtcccacagggtgaaggttaggtgctttgcccctggtcacacaggttcagagccaggcatgacagacagattccctcgggtcacccccactggcatcctgggcacctgggttggttttgcctcttgagtcagcaggtccaggaggcccctaacaatgaggggttcctcccccacccagttcctctcccaccacatcctcagagaggtatcttcagcttcatctgtggcttcttaacctgacattaggaggggcaacagccgtagcctcagcctcctcctgggacctggaaggggacactttcagttgctttgagcttggttcttggagagaccaagacagggctctctcaggactccagctctctcaggactggccctgggcttctagccaagccctgcaggccaggcatggaagggctccacttaacactcatgtctgccctgagagagggacatttcccctgcccagcaggggaggctgggaagaggtgggccccttgcctaagatcacatagccgggtaacagcagagcctgggtttgagctgagatggctccgaagcctgtactgagctcgcctgtgcccctgacaccctagcacacagccacgcctgtaggaggagggctgcccttactggaaggtgctgtcccgcgtgatggaaccctgtggccccttttggatgtggatgccagacaccagccagttctcatagatgagctggtcgccagccacctgtaggaagagacagctgggtgaggctttctggtgggggaccaggccccagcctgtggtcccggctcctacctgcattgtggttccacagtgggtgagagggaagtagaagaccacgaaagcttccgtgtgctgtgttggggagcagctggtgggggcataggccaggtggatgttggccagtgtgatcctgtgtgtcaaggccatttcttgggacaccacgaggacgaagtagccatctctgaagcactggacagtagctgggacaaaggcagatgagggccttggggtttggtgtccatccagcacagagacgggatggctgggtgacagccaggctttaagtgccggtctaggagaatggacgcttactctccacttaggctggtgttggccccagcaaaccctttatggactgattttctcatccatgtgacaaatgagttgaactacactctaaaagtaggttcaccatataatctgtcatccaaaccagggcgtttcagatctgaaagtccagatgtgtgtaaggtagatctattaatagttccctgggacagttgttataaggccagctgggacatgtgaccgccccatctaaaggtctcctctgccatctgctctgggagttgggctctccaggaggaggataggaagcagtttccaccagctggaggagacagctctccttccgcttcagaatccaagggaccaggatcttgctggggtgggaggttgtacctgtgttgccatagtaacagggaacctctctggtgttgtcatagcagcagccagcctgctgacaggcttcttttgaagttcttctcacgatgcaggggaggtgccctgaggccacctggcactgctcctggctcaggtgggtacctagggttgggacagagtgatgaggctgaaggcacacagtttgcaaatcatggccctggaattgaatcttgggaacctgctccagagcttgtgctcttagccagcacagtaaatgtcctccctcaaaactgaatattactgaaatttctagagaatattttctgagaatcaggtgttgctggcaatggtttcaatgagtttctgcctaaagttaggaaacaaatttacaagacctcttctagctttagtacacctatacatgtttaaagctgttttccaaatactacaaaggaataaaagaatcatctttttctaaaaaaagaaaaaaacaaaaaaagaaatggcttagagcccagtaaaaggctgttaggccaccctgtactccagaagtccccagacagagggtaagtacactcagatgtcctgcgtacctatgtaatctcgtttgttcacatcccagtgttccaaggtgccccagtggggttgagccagggtggcgagggtaggtccaggtccaggggatggtaaagcaggggttgggtggacagagctgtgccctgggtccagtgggctgggaaaggcatggccagagccttgggaggtatggccagaggtggggaggaaggaaagggtttgtgggattgagacagagaacatggcgggtggtgccagctgggagtccagagtccgggaggggtcaggtttgggacagatcagagtagcgtcttgtgccacatccacacgaccattgggcagcacagcctccatgaacaccctcaggtggaaacgcccatcctgcaggtgagaggccatcatagagcagcaaggtgaggccacctagcatacccaggcaggggacgggcccacgagagctgagctggccattaggcagggagctggattcatggtggattccagaaagtaccttccagagcttagtttccctcacccaccagctcaacagatcttcggctttggctcctttctggttcatgaggggcctcttcagcctgacatgacactaggacaagcttgcccctgtgccagagcatgaacaacccctaccttctccagcacgtggcagcctctgtaatcggccgagaagactgcaggctcctgcggcctggaggtgacccagtggtagcagatggagcagttgttgacatcaaatcggttcccaaattcatctgcagtgggggaaggggaggggccagggatgttgaagggtgcagggagaggttgctggggtctcggaaggagttcccactcagcagccaggagacctgggttcttgccttagctttgctattagtttgttgtgtggtcttgggcaagccccctcccctctctgctctcagtttccacagctgtaaggggatgggagggtcttaggatctttctagctagggttccctgctcacagcacacggcagcaggcaggcacgaagatgaggtggagaagggatacacagggtctcaggcactggcctgagtatttcacatcacttcttttaagcttagttatccacatcctgtggctgaggcagctgaggaagggagggtgcgtgagctttcttaggtgcacacaatgaggggcagaatgaggatttgaatcctgggctttgtagaaagatctgaacccatttcccaggttaactgtggctgctgcagttgcttggagacaccccctaggtgtccaccctgcttgttgccccagaacagcctgggcattccctgggtgtgggcatgtccccatgcccttgttccatgagcacggccaggttcatcttccccaccttgcagatgaggaaacagaggcttatgagtcaggtcagttgtccaaaatcatcccgtttagaagctgcagatccaaaccccagttctaaacccacaccaggccacgcctactaggtcctgctgctggaagtggtttatggaccctcagcctcagttttgactgagcgtggttagagatgcagagcctaggctgggtgcagtggctcacgcctataaccccagcactttgggaggctgaggcaggtggatcacctgaggtcaggagttcgagaccagcctgaccaatatcgtgaaactccatctctactaaaaatacaaaaagtagctgggcgtggtggcacacacctgtagtcccagctactaagaggctgaggcaggagaattgcttgaacctgggtggtggaggttgcagtgagctgagatcgtgccaactgcactcaagcctggagaacagattgaaagaagtgagactgtctcagaaaaaaaaaaaaaaagaaaagaaatgcagaggcttggccctgccccaggtccactgaatcagaacctgcacctcaacaaggtggccaggtgtttcccatgcacactaacgtgggagaagctgccctgggtgatgattctcctccttgcccttttctgtggtgagggggtggggggctggacacccccaggctggagggaggcctctgttcttgctccttcaggggaagggtcccagctcccttctggcagcagcccgtggccagggaggcaggggccaggactctgccagcactcacccaccaccttgaagcggagagtctggcctggcctggggaacaccagcagctgcattcccttgatcccacagtcgtagctgtgccggaggcctgggaggccagggtcgggctggagccacctacccagccccagggtggcgaccagcagtagcagggccacagggtaaccccaggtcgtggctgagcctcctgccatgagacgccacagacacaccccctactccctcgccaccagagctgggcccaggccttttatggaggaggtggcaagtgggtgcctgtaagggcaaagggggcccacctggaggagcacccacctggccaccaggggctgtggtgaaactcctgttccaaaggcagcgggaggcagaaagctgcacgtggcccctcaccctggctttctgtctcacagctgtggctttggaagggaggagggagctttccagaaaactgaggttgcagatgggctgtgggaagggatccagggctaggaggtggcactgcagacctcaggccctccactgtctccctctcaccccagcctttctgcattcccttcctgccccaacaggctctccaggtcctccttcctgccttgaggcctcaggaccactgggagctgccggcctggttagtgcagtcacagctcctcaggcagggctttaggggcattagagcaagaccaggaagacacagccctcagagctggcagcggaatggggactgcaggtgagtaaacagaccagtagcacctccaagggctctcctgaggattcagccggtcagtatgatgatgactatgactaataaaaaataacaaggacaactaaatgtaatgtggcatctggatgggatcgtggaacagaaaaaggcagtaaaagtgaagaaagtggattttagttaataataatgtgtccacatttgtttgttcattaattgtaataaatgtatcatactcaagtaagatcagttatggggtaaactgggcctgcggtgtatgggaactgtctgtactatcttctcagttctgtaaatctagaacagttctaagacataaaagtggctggaaacaacaagaatggcctgtggtctgccatgattacagtgccaggtcttgcttgtgttagatccttataccgcctgaccatcctctgaggaagggactgtcaccagccccacgtcctggcactaattcctgcaagtgattagcctagggcccagcagcgtttgagctcagcaaacattaggaaactgagctcagcaaacattagaaaatgcagctattataattagcagctgctggaaggggagagcaagaggcttgatagctaagagcccggttctggtgaggttgcggagaaaaaggaatgcttatacgctcttggtgggggtgtaaattggtttgaccactgtgggagtgtggtgattcctcaaagagctgaaaacagaactatcatttgatgcagaaatcgcattactgggtatatatccaaaggaatataaattgttctatcataaagacactgaacctgcgtgcatatgttcagtgcagcatgattcacaatagccaagacatggaatcaaatgcccatcaatggtagactcaataaagaaaatctggtacatgctgagcacggtggctcacgcctgtaatcccagcactttgggaggccgaggcgggcggatcacgaggtcaggagatcgagaccatcctggctaacacggtgaaaccctgtctctactaaaaatacaaaaattagctgggtgtggtggcacgcacctgtagtcccagctactcaggaggctgaggcaggagaatcgcttgaacccaggagacggaggttgcagcgagccgagattgtgctgttgcactccagcctggccgacagagtgagactctgtctcaaaaaaaaaaaaaaaaaaagaaaaagaaaaaaaaaaaaggaaaatgtggtacacatacaccatggaatactatgcagccataaaaaagaatgagatcacatctcttgcaagaacatggatggagctggaggatattatccttagcaaacaaatgcaggaacagaaaccaataccacatgttctcacttataactgaaggctaaatgatgacaacatatggacacatagaggggaatggcacacactggggcctattgaagggtagagggtaagaggaaggagaagggtggaaataataactattgggtgctaggcttagtatctgggtgatgaaataatctgtacaacaatccctctggacatgcatttacctatataacaaacctgcataagtaaccctgaacctaaaataaaagtttaaacaaaaaaagttggttctaatggtgccccaaccactttcttagctgtgactcagatgcattatctattctgagcctcaggtttcctgtttgtaaactgggggtgataatgctttccttgcccacatggtggataggaagacacaaagagacaagtcatgggtaccaggtgcagtaatgatttaatgcttggcaataattcacttctactgtgattaaagctcagctgggaaagcttggtggggcggggtgggagtccctctgggggcacagtgggaagaggcacccaacacagcatcgaggatgggcgacatggaagtgtttttggaggaaaggggtcctgagcagaggtgggaggaggcggggaggacagggatggtgcaatggggatctggggagagcagagctggaggaggagggaggaagcaggtcacacaaaggtccaggacaaggactccaggcaggctgagggtgctggcgagggaaggactaggaggggaaggagaggagccaggcaggagcggggagtggggtggattttccctgagggacgatgtggaagttttaaacttttaattttgaaattatttcagatttgcagaatttccatatagcctcctccagattcctcagatgttcactgttcactttttacatttgctgtagctcccgctttctctctctgcatgtgtgcagacatacacgcacgcacacgcacgcacacgcacacacgcacacattcttccatatcattcaagagtcagttgcagaaatgacagattcccctttacctctaattacttcagtatacatttcctaaaaaaacaaatcacccctacagtcaaatgatcaaaatcaggaaaccaacaatggtataaacacaacgatctaatctgcagacattattgtaagaaataaagaggaaagcaacatgaaagggcggttcaacaggcaacagggacaggtttatgttgagtaaacctgagaggggcggctggccgagttaggtcagagccccactctcttacagattaagagttaaggattcagggcgggggagtttatcagaggcttggactgctcctgtgtctctttgctgtgcgtatctgggagggagagttgtgtgtctgttcccatatatctttctgcagctacaggcatatccccagagtctgcttttagcttccctatcttagtgcccctgaaggaaaaggaatgtgcttattaaggcccactgttttactggggctcattgtgtgagggtgaagtttggcagttaccaaagagaccttccctccaccccgctctgtgccggagctgtcttatctgtattttactgtctgctctttctggctgttgtagttagaagagaagtgatttccttgaaatgcatgaggctagaaagggagctggagcttaaagtggcagtatttgtccgagatgacggtgctcctgctctgacaattactcaacatctgccgactgtcctaactgtgactttcatggcaaaggagtacagtggttttgggagtctgcaggatccaatccaggctcagagtctcgctggcgtgcctcttggcctcctctgatctgggaccgcccttctatcttcttttgtctttcatacccttgacattttttagtacagccggatgattttgcagaatggccctcagtttgggtttgtctggtgttttctcctggttacattagatttagttgatgcatcttggccttgtattagtccgtttggctgctgtaacaaaatacagactgagtggcttaaataacagtctttttctcacagctctggagcctggatgtgctaggtcaaagtggtggcaggtctggttgctcctgaggcctctctctttggcctgcagacaaccgtcttctcactgagtcctcacgtggtctttcccctgtgctggtgcgtccttggtgtctctttgaatggtcaaattccctcttcttctggctggcacggtggctcacgcctgtaatcctagcactttgggaggccgaggtgggcagatcacttgaggtcaggagtttgagaccagcctggccaacatggtgaaaccccatctctactaaaaatacaaactaattagttgggtgtggtggtgcacacctgcaatcccagctcctcaggaggctgaggtgggagaatcacttgaacctgggaggtggaggttgcagggagccaagacggcaccactgcactccagtctggaagacagagtgaaattccatcccaaaaaacaaaaacaaatttcctcttcttctaaggacaccagtcagattggattagggccaccttaaggggctcaatcttaaatcacatctttaaaagctctatctccaaatacagtcacattctgagggatgggggtggagggttagggatttcgcatatgaattttggggggatacaattcagcttgtacagaagtgatgttgtgtccttctcagtatctcgaggcacaccccgctggcttgtcctgttattgctgatgtgactttgatcacttggataaggtggtgtctgccaggtttctccaccataaagtaatgatgtttctctttgtaattcatgagtatcttacagggagatactttgagactatgtaatcaatcctgctcctcttcaaatgttcactggctagtgtggttgccaagtgggtggtggttctctaactctacccttccttctgcatttatttgctatcataagagagaacttttcctaacgggggcttttaggggccagagagagaatcagctggagtctttgagaggcctggattttgcctggtgctcactgtttatgagcacaagggccctgggaagtcacttaccggcttttttcctctatctggagagtaaggatgagaatgattatggtggggatgcaattacataagacacggagaggtgtttccccactggtcatggacccatggggaaagtacgtctcccaaggtgctggaaatgggcagggaaagagaaggggggcttcctcagggccaagggcagaacacctttgggaaaagggtaccagagtatccaagagagagagagagcgcgcacgagcgccctgagccctcggttacgactctacgttcttgcaaagactcatggacaccaagaattatcagcctgggaggatcccagctcctctgctcacccactggagaccttggaaaagtcccttccctgctctgtgacttgctttcctcatctataaaatggggttataatagcacctaaattgtagggttgctctgaggattaaatgagataatccatgtgaagcaggcagaacagggtctgcacatggtcatcatttgaacacgatagccattacaaccacgattatttttattgataaagagagagggtcagatggaggtgacttgacttggaatcttggctttatccacttggcttctggtttttgggtttttttttagagatggggtcttgctatattgcccaggctggtctcaaactcctgggctcaagcaatctgcccgcctctgtctcccaaagtgctgggattacaggcatgagcctccacacctggccacttggcctgtttgtaaacctgtttgttcatttctttctttctgtttttaacctatgaatttttttttaatggaacttcagtttcttttctttctttttttttttttgttttgttttgagacagagtctcactctatcgcccaggctggagtgcagtggcgcgatctcggctcactgcaagctccgcctcccggttcacaccattctccagccttagcctcccgagtagctgggactgcaggcgctggccaccatgcccggctaattttttatatttttagtagagacggggtttcaccgtgttagccaggatggtctcgatctcctgaccttgcgatccgcccgcctcagcctcccaaagtgctgggattacaggcgtgagccaccgcacccagttggaacttgagtttcttaatctataaaatggaactaagaatacagtccacctaagtggggcgccgtgtaagtatcagttgcttgccctgtctcctctgtgaatagagcctagggaaggcactggaggaggatggagcctctctaggctggaaagacaaaatcccctttcaggggatccatgcatgccaggaaaccagcaggaagcaggctgcctcactccggggcctgcagagtaacccaagagcagcgccagctgtgtgtgtatgtatggaccgtgctcaccgcagagatgctcccagaaggccagtgggagcgcatttaactgaagacaggcagccctgcttcccctgagggaacaaagaacctcagagaatctcatcagctgcgaagagctgggctctgctgctggaccacatggctctgaactccagctcctctgctccccagctgagcaggcttggtagggttgcttaagctctctgagcctcagttttccccttggtgagtgacgatgatagtggtacctaactcagaggggtgcgtgaatatttgatgagctcatccatgagcaagtttcagccttacgctggcacatagtgagtgccccataagtgttagctattactgttttcatttttttttttttttttttttgagatggcgtctcgctctgtcacccaggctggagtggagtggcaggatctcggctcaccataacctccgcctcctgggttcaagcgattctcctgcctcagcctcctgaatagctggtattacaggcgtgcaccatcacacctggctaatttttgtatttttagtagagatggggttttgcctgttggccaggctggtctcgaactcctgacctcaagtgatctgtccgcctcatcctcccgaagtgctgggattgcaggcatgagccaccgtacccagaagctattgttgctttcactgtgttgaatggtggccctcaaaagacatgtccacaacctaacccctggaacctgtgaatgtggccttatttggataagaggactttgcagatgtaatcaatttaagaatctcaagatgagagcaccctggatgatccagatgagccctaagtccagtgaccagtactctgtgagagacacatgaaaagagggagggggaaggccaggtaaagaggaggtagagattgcagtgatgcagccctaagccaagggacgcctggagccaccagaagctggaggggccaaaaagtctccttttctagagctttcggaggaagtgctgacatctgattacagactctggcttccagactgtaagagaataagtctctgttgtttaaagctgccacgtttgtggtagtttgttctgacagcccgaagaaacaaatacaccactgttgtttctgcgacgattgcctggcacatgtgtgggcctgagcccaggccagggctgcctctgcctgctctgccttcttgtcttccttcctactataaagcgatcagtccccaaggttgtacccactgcaggtgaagacagagccatggagaattgcaccagaccatgggtaagaaaggttccagaatggggccggacacagtggctcaggcctgtaatcccaggactttgggaggctgaggcaggcagatcacctgatgtcaggagtttgagaccagccaggctaacatggtgaaaccccttctctactaaaaatacaaaaattagccgggtgcggtggcgcacgcctgcagtcccagctacttgggaggctgaggcaagagagtcgcttcaacccgggaggcggaggttgcagtgagccaagatagggccactgcactccagcctgtgcaacagagcgagactcagtctcaaaaaaaaaaaaaaaaaaaaaagtaaaggtctcagaatgggtcaccacaagggactggggtcctttgaggtctgcacagggaagccaattttagagattcattctgttcagcaaatatatgttgggacccctctcatgtgtcaggccctctgcttgcctttggaggtgagaagataaaacaggaataagtctctgtcttcaggtggctcatgagggtggtgaacagttgtgtgaacaagagttaccagggaagacaggggggctgcaggtcaagtgaagtggagatgtgggagggagggacagcaagtgggtctgtctgagagaatcagcaaaggcttcccagaggaggcaacctctaaccagggttttgaaggatgaataggagttcactgagaggccaagggaagaaaaggcattccagagcagagcacaaacagcataagccagggcacagaaacagcctggtgggcacagaaacagcctggtgtgtacagaaaaagcctggtgtgcacaggacaggaggggacagtggtgagtgctggctgatgacaggatgccactagggagtggcagcaatgccaggggaggcttgggtgggactggatcaccgaggggcttgttggccatgcgaggagtcctgtgggtgatggtggcaccagggaactcaacctgggcctccccaaggtatcatttggggccctgccatgctgctcctctactgggtgtgggtagctcgagggcctccgagcaaggggctggaggatcccagggcaggcctcaccctgcttcctgccctgcatctcacttcctgtttgactgacttctttaaagtggccagaaaggaacataaaaaacccacctagagggagaagaaagcccatgtgggctgggcctatgcttgggggctccatctgcccctccttcattcctttgctcccttggctgtatttgttaaacattgatgctgtaagtatcctctgagtatctagtgacattggtggtctcagaaagaggtcctgcaggatgagtcgtggaggggaagtggcattcccagcagcacgtgccaaggcatggaggtggggaaagaaaggatggggtagctgtggacatgaggaagggggtgcagggactggtggttggtgcactggatcctgagaggccttgaatgctaggttgggaatctggacagctcccatgggcagcagagatgcagcagaggtcccgtgtgccaggaagcgacaggctcagattcatctcctccacggcagaaggtgatgctgaggcagcgagggacccgacttccgctcttactgcctctgatattaagttccaagccttggaggaggttgtaatttagggactagggcctgagcctgagtgcagctgcatctttctcccagtcctgggggacacaagccatgggataaggcagggcacggctcttcttcagaaaatgcctctgggccctgctcatctggaacttgttttggtaactttaagcttagtagctttttttgtttacttagtaatacattttctttagagagaacacacacactgggttttctttagagaggaacacactcgcactggggctggacatgagtcactacagtgattacaggactggaaacaaggactgagaaggggcagatgagtaagggttttttagccagaaaagaagcacctcagcagggtggccaggagaggttgtgcaggatgttcactgtacaaggataccagtggaagggtcaagggtgggctgagatccagaggaagggctgtgccttatctcaagcctgatgccctggtgctgagatgtgtctgtggggtggggtggtggggaaggggtgattctttttcttagtccaaagataaatctgggctccaacccctgtcctttgagggtgggactgtgcagaaggaacaccatttaaagttcatattttactgctgtgaagttacttgcccaagatcacatagctgaggagtggcagtgccagatccagacactggtggtctggccccagagtccctgggcttaaccacagcctgacactctctgtgcgcagacaaggcacacgtggccttgtctgtggttcagtgggttgggtgtccggggtgggtggaaaagagggcactttccccatgcagaatggaatcatccacctatgttctctggagggctgcaggcatttgtctttggaaatcaagccttccctgacctggaggagaggggacattttcctattgttaatgatttggatcaccaaggctcttactgatctgccatattgggctacagtgagatgtattatccccatcacaagggcatagcattttactcattttccactcatgatggtagcctctcagcaagagcgtattatgcattagtctctgcgttaagactaggcctaaatggaagatgcttgtgctgtccatctcatgggaggtgcctttgcctcgatacagggatattgagttcttaaaatgttttaatgagtatccattaggtgctgagatgctgaggttgaagggatggtcctgaccccaggaagcttggtcagcaaatgagagtaaggagttagggaacaatgaaatgcaaacttctcttatcctagggctttgagcctgtgtgtttttttgtttgtttgtttttgttttttagtttaaatttccatttttttttttttgagatggagtttttactctgtcacccaggttggagtgcagtggtgtgatctcggctcaatgcaacctccacctcctgggtttaagcgattctcatgcctcagcctcccaagtagctggggttacaggcatgtgccaccacgcctggctgagttttgtatttttagtacagacaggggttttgccacattggccagtctggtcttgaactcctgacctcaagtgatccatccgcctcggcctcccaaaattgagcctgttttaaataaaagctatatgacctttgccttagagcctatattcatttttccctcagaggagaaggaagctgatttttataagcacttactgtgtgccacgagctttgtgcaatccatctcattcaacccttaccacagcctgtaaggccgatgttactgctcccgttcacagatgacaaccccagggctcagcaaacagaagtgactgacctcttggactgcgttcttgccactgcccccactaccccactgtactttcctggccttagagccctcgggtccctcatggacaggcccccacactgcctgggaaactcagaacagctggaggggtttcttctctgaggattctggtgtcgggagatggaagcccaggaacagtggacagatggatgagacattctccttctcacgcacttatcctacacactggtcactctcaaaagcacacccctagtcacactcgggctcacactctcttgcacacatcgattttttcacgtgcacttgcactgccctctggacttctgcagtctccttcatgaagcggggatgggtggagcaggggctgccggcattgatggaaattgatgatatttgaacatctgtgtggcaactcactctccagctgtccccgcctcccccaaccccacccctaaacacacatgcactggggctgacagctatttcctctctcagcctccctctcccacctctgtctgcccgctgcctcttgtctagctgctgtcaggagctgactgcctccagggctggaatcctgtgctccctctgtgcccaggtaaggaggagtggcccaggggttgggcagcctagtgccctctctagacccacagaagaaggcaaagttttaccaggtgagagggctgttaccagctaggatggcagaagattgagtttaccaaagactggaggggacttggtgctcagaggagggaaggattagcttctcttaggcattaactagatgtcagatacgaggggaaaccactcaactgtctgtcaatattcacaagcagtctgggtgggaagatgacaccagcacgcttagagtaactggcccaaggtcacgcagccaggaagctgaggagctgggattcaaacccaggtcttggactcccacagcttgcactctctgtccctttttttttttttttttcttaacctgccaaagccggaccttagctgcttggctcctgagaatcctgggaggctgggggctgtctctatagagttagaaggactgatctggtggtgcccaagggtgtggcaggactgtgctctctgatcatccccataggacttggatcagcagcagctggtctgcagggaatgtttcagggcagacagcgggtggtacttggctatctgctgggagtgaagtcccagccccactgttgcagctgaggaacgctgggcaagttgttgtttcttcttctgaaaaatggggtgtcataggttcattgcaagagtaactgctctgcacattctaaagcctaggaagtatgaccattctcaggaagcacaggctcctcttccatctacctgcaggtctctagctccaaggggctcctccgccagcagaattctagtttgatattccagaaccccactctacaaaggactgtggtctctggaagggagtgggttttctcatcctggccaacagtgttttccctagaaagatgagtactgaagaccattgctcccctctcccgcttttcttcctcctcctccatcctctcttccttggagtaggggtagaggaaagagcacaggctgagcatgaaactttctcctccacatgtttgtgctgtctgggtggctctgggccagttatttaaccacttgaggctcagttttctcatctgtaaaataggatggagtactagcaccatttttctagagccagaaagacagcacctatgtgaaggacctaccatagtacctggagtgtcattggtgcccaggacaccctgagtccctgtcccctgctacttgcctcctacctcctgcatggagcctcatggaatttcctcagccctcactggtcttgaccagcctcacatcagatggtctttcgggctttcaatgaggatgtaagcatgcacgtcttatttgttggatgagtgcatgatggagtaagtgaatgaacaggggtgggtttcctggggcggagagagctgctgtggctgctcctgagaagggagagatcttttggccccactgggcctccagagccccatgtgggagttcctcctccccagctctcctggctcttatcttatttcctctccaaccatcagaggaggggctggttccactgtttatggtcggcacatctaaccagccaccactgagtgcggggagctgcatggaggatctgtagagaggcaacatctgggggcgctgtggatgctgtgggaaggggcagcatctccatcgcccaggccagcagaatcctcttgccctaattgtggggcctccttcacccgccagtgctctggggatgggaaaaaggagtcctgtgtggcctgaccttgttcctttttctctgtgtgatcttagaccatttgctccataatcatcacaatgacactgataaagtgcttgctctgtgccaggccatgttctaaatgcttttatgtattaaactcacttaattctcccaataactctatgagctaggtgatgttatgactgacatccaagtttcagaggcagaaaaaggctcgggaaggttaaatgacttgcccaagcacagcaatgctgggatattattccccccacccccaccgcccaatatattcgtgggtcacattggcatctcctgggcagggtcccactccgggcctctctcttggttccccggtggcctctgcacttccaacttaggcgcctccttccctccactgcagagccccacgatgtcggccaacgccacactgaagccactctgccccatcctggagcagatgagccgtctccagagccacagcaacaccagcatccgctacatcgaccacgcggccgtgctgctgcacgggctggcctcgctgctgggcctggtggagaatggagtcatcctcttcgtggtgggctgccgcatgcgccagaccgtggtcaccacctgggtgctgcacctggcgctgtccgacctgttggcctctgcttccctgcccttcttcacctacttcttggccgtgggccactcgtgggagctgggcaccaccttctgcaaactgcactcctccatcttctttctcaacatgttcgccagcggcttcctgctcagcgccatcagcctggaccgctgcctgcaggtggtgcggccggtgtgggcgcagaaccaccgcaccgtggccgcggcgcacaaagtctgcctggtgctttgggcactagcggtgctcaacacggtgccctatttcgtgttccgggacaccatctcgcggctggacgggcgcattatgtgctactacaatgtgctgctcctgaacccggggcctgaccgcgatgccacgtgcaactcgcgccaggcggccctggccgtcagcaagttcctgctggccttcctggtgccgctggcgatcatcgcctcgagccacgcggccgtgagcctgcggttgcagcaccgcggccgccggcggccaggccgcttcgtgcgcctggtggcggccgtcgtggccgccttcgcgctctgctgggggccctaccacgtgttcagcctgctggaggcgcgggcgcacgcaaacccggggctgcggccgctcgtgtggcgcgggctgcccttcgtcaccagcctggccttcttcaacagcgtggccaacccggtgctctacgtgctcacctgccccgacatgctgcgcaagctgcggcgctcgctgcgcacggtgctggagagcgtgctggtggacgacagcgagctgggtggcgcgggaagcagccgccgccgccgcacctcctccaccgcccgctcggcctcccctttagctctctgcagccgcccggaggaaccgcggggccccgcgcgtctcctcggctggctgctgggcagctgcgcagcgtccccgcagacgggccccctgaaccgggcgctgagcagcacctcgagttagaacccggcccacgtagggcggcactcacacgcgaaagtatcaccagggtgccgcggttcaattcgatatccggactcctgccgcagtgatcaaagtccgaggggcgggacccaggcacctgcattttaaagcgccccgggagactctgaatctttttcagaaacagtgagttaaagcagtgcttctcaaaccttgatgtgcctgtgaatcacctaggggtcttgttaagtgcagtctgatccaggaggccggggccgggtactgagagtctgcacttaacaagctcccaggccgagaagccagtgcggcaggttcacaggcgaggcctggagtaacacaaagtgaaactcataatagacttcccactctagggcagtggagtcggaagggcacacggggtgcgtctccccggagttcagttttaccagatgatgggggaggggggaaggagttttatgttaaaccatccatgtatttttggagaagagagaggaaaggtttgagaagcactgttccagcctgccctcttcatttagccaatgcttactgcgctagacgcttcatcccacaatcttaaggggcagcttctattagccagtctttacagctgagcacattctggctcagggaggttaagtgacttgcccagtttcagggctaacgaccacagggtctgcactctaaccctaggcatcacatgctcaatgactctctggtgagcgaggacattctctgacctactcgagggacttaagatgctaccttgtgacccagcactgcccaaagtgcttccaaggcagaagcagcaggggatggcgtggtcaagcactcgggaaacctggggctaatcaaatccaatgggggaaatgactaaaagtcttcggtcgttagaagttgaatgggcacagcaactctaagactacagcacacgtcatttcttagctaagcggaccagcctccctgtcggcctggtgttctgtgggatccctctgggcactggtaatcccaagatctgtgcagccccgcctccaggccacatggggctgggcagctaccatttcccttttgcggatgggaggggtaacttgcacctctgacctatcacttccactgcaccccgtctcattcctccacctgccgtggacttggggtcagagactgctgtgtttgagctctgcagcccagggaccgaaaagttggtgtcaatgaattttgcttggtggatgaaatgtcagtggaagaagcagatgagaaactcttgagatcttggtcctgtgttttttctgccaccaaaggccagggtcactgaaggcctggcccacagcaggtgctgagcaaagggaacagtgaggtgcccagctagctgcagagccaccctgtgttgacacctcgcccctgctccctcccatcccttccccctttactcatagcacttcccccattggacacgtggtgcattttgcttgtttattatgttttctctccatcagaatgaaagctcctcgagggcagggactttggtctattgtctgtatttgccggtgcctaggattgtgcctgtatgcaacaggcactcaataaatatttttgctgtagactggacaggcatgagttagattctctggggcttctgcagagactggtttgggaaagtgggtgctagggaaaagctctgctccctgcaacctccccattttaatctttcagtattgaaaagtggagaggaaccggattcagtttgctggggacagaggcagtggggtgtggaggtgctcagagcagcctttgggaaggtgtgggggaagctggattcccaactgtcagcctccaggcctgggatggacctaggatgctgagaaagggcatacactgctgagggagtcacctgccagtcaccagctcactgaggaaccagaagaatgtacagttcttggtttgaaggcacttggagaaggagaggaaggagggatgggagctgaatctcttcccgcccccatctctgccaggtcccaggccccctctgggcttctgtcccacacagacctgcctggaagccttcaaaggccgaggagccccggtcggggtgggggtccctgttctggagccatgggtttggagtgccagctccagcagaggcatctgagcagcggcctgaggtgctgtgtctgacatggttgttggccatggaaggcctcgggccgtcctgagctcagatcttggctgccggctgctggggcggctgcttctgcagcagggccagggtgtcccgcttctcaatggagcgcagctgcttcttctttgcccgcttgagcttggcggggtttcggatctgggggtggtatgaggggaggacattagtgcggctgcagcctcggtccaaattcccaggggagaggaaggccgccccacaggggcctgagatcgtagcatgagagtgggggtacatgaggcaggggtcgaggccctggtttgcacccccaagtggggcagaagggcagagggggaaaacgagacactcaccacttggacgacctctgccttccgctcattctccaggcggcgtttcaggttctcagcccggcgctgtttcttctcctggaacatgtgggagaaggggatttgagtcggggagcagaggcagccctggtctctcaggccccagaagagtgcgagcgggcagaattcccaggaggaaggggaaaggccctctctgccaggctccaggttggtgatgtgtgggtggagggctagcaatcctgtgccacggtctagtgccaggggcctgctgtggtggaagctcctgatagcatgttgagaggtgggtatgggacaggcaactgaggacaggggctgagacactgggggtgcccacctggagattcacgcacatgcagacagtgacccctcatgccaccctcatcaactgccaagggagaaaggggtgctggcccttcccccattcccaccctctccgacagtctccccctcttcccctggagtcctgctgctgcagaatgccaggctaggggtgagggctgggtccctgagattttcacaggtgtggggctgggcaggggctgcactgcacagaaaaggctctggagctatctgggctgggtttcaatctggatcctgttatttcctaaacaggagaccttagctaagtctgtgcctcagcttcttcatctttaaagtgacagtgaccacagtatctacctcgtaagatagttttgggaaatcaatgagggaatgcacgtgcaggacttggagcagcccctagctccttgggcacactgagactctagatggagtctgtcttgggaggggaagcccagtgctctctagccatgctgactgtgtccctcagcaaggccagggtggggacgtcagctccaaggctgctgcatggttaggagtctctgctggctttggtgacttggggtagcaggggtggcccaggcccctggggaggaaggagaagtgagccttggcctcctgtggtcagggcaggcccgggctgggggctgggcaggagcacctccgcagtggacggtgagaagtgagacggcagctctgtcttgcccaagagggagccagggccacacaggaaaagagataaggcctcagcatatggtggcggacacactgttcctcagatgtcagctgtaagctgagctggggtgacttagagcaggggacagatgactgagtgactggcccaccccttttctcagtggccagcctgggaccacggactatggatgagttgtctgaatcccgttcggcactcctcctacacgcctgggtcattagaggagtggaggaggaatctcccactgactgccctgccctggggggcaggagctgaccaatgccactccgctttctctgcatgctgcctgctgagtgccctcttccccccgcttaaaagtccctggcagatgtgggtgaggctgtgaccctttacaggggcttcctggctctgggatgggtgacaggggacagaagtggaggaaaggtgcgggggccatccacgttgctggtgtgtgggctgcttcttggagaatgacagcagccataccggggacatggagttcaaatctgcaagcccttcccaactgagtacgtcccagcaaagggccctcgaccccatctcactgactgccctaccacccaggacttcctcccgggcttctccccaaggcccgcttctggtcctccccctccgtccctgtccctgaggctctttcagcagcccaggctaaactgtatggtcccctgggcctccctgccctgtagtcccagattgcacttctgcttctggccaggtgcccttcctccctccggccttcagattcaagaacgttttttaaccaagtcggcctcccccaggcacccgtggaggccctcgcctcaggtctgtaccagtagacactagcttagtcctctgagccccagcctcagcctggctggcccctcacctggcggcgcctctccttctcctcctccaggtgacgggcaaagtccttggccagcttcctctcctgtcgttccttcatcttccgctgccacgatgtgcgcaggggcttgtcctgaagcatctgggagaatctgaaagggggagagtgggtgcatacagggtctgtggggcaagcgccacccatgccctgtctcctctcggccggaggctctggaccttcttccccagagcccaggcagaaccacctccttgctggcctgacaggcggccttccagggctgcagaaacttggggcgggagggaaccctgatcgtgctggctgccatttctcaagccttggctacatgcctctgaggtgggtactcctatcctctccacttacagaggagcaggccaaggcgcggagaggttaaatagctgcctaaagataccttgtggcagtcaggacttgaatcctgtcagcgactgcagagtccaggctacgcggcccctgctgtaaagttctgttgcttccgccaagtgcatttggcccgggtgtgaatgcctctggaggcggggcgctcaccccctagggaggtggcccattccatttcagaacagtgtgagtggttaaagttctgggtaatgattcaggatcttccccgccaagaccggatgcagtggtcatgcttgtaatcccagcactttgggaggccaaggtgggcagaccacgtgagtccaggagttggagaccagccgggcaaacatggcaaaacctactaagcctactaaaacctactaaagtttctactaaaaatacaaaaattagctgggtgtgatggtgtatgcctatagtcccagctacttgggaggctgaggtacaacaattgcttgaacctgggaggtggaggttgcagtgagccgagatcgcgccactgcactccagcctgggtgacagagcaagactctgtctcaaaaaaaaaaaagaaaaaagaaaaaagaaaaagaatctcttcccccagttggagatgaagtgggcatcagggctctcagggaaatctgaaaagagcaacgatgattttagagttacaggagaactgagctcatctctgtaaaaatgcatactacaaggatttatgaatgggatgatatgtctaggatgtactttaaaatatttcagggaaaaaaaaatgccaaagatcagccgggcgcagtggctcacgcctgtaatcccagcactttgggaggctgaggtgggccgatcacctaaggtcgggagttcgagaccagcttgaccaacatggagaaaccctgtctctactaaaaatacaaaattagctgggtgtggtggcacacacctgtaatcccagctacttgggaggctgaggcaggagaatcgcttgaacccaggaggcggaggttgcggtgagccgagattgctccattgcactctggcctgggcaacaagaatgaaactccgtctcaaaacaaaaaaaaagaaaaaaagaaaaaaaagccaagtatcaaagatgaagctacactagtaaaatgctgagctgtgttgatgctgataatggggacttgagagctttgctctttctttgtatgcttgaaaatttccattcaaaaaaagtaaaaacaaaatgcaaagaagtctctcggtggcctccacatgctgaaattaggtctttctcttttaaagattcaaggcccattttggtgtcccttggccctgccgacttctggccccagctccctgatttccttctccccttcccaaggccttgccactgaaggcctggcctcctaagcactaagaatggggtgccacatggacttcccccataactgtaaagctgggcttcccaagctggggtacgagaaccctgaagggacaaggtgttgggagcctagagacacacagaaccacaagacacagtgctgcatctgtgtagagcagggctgtcaaacagaacgttctgtgatggtggaaacattccacattgacactgtccaataaggtagccactagtcatgggtggctgctgagcgctagaaatgtggttggtgttgatagagaaactgaatcttaaattttatttaattttaattaatttaaatgtacatagccacatgtggctggcggctaaggtactgaggcagggcagttccagaccattggttctacctgggtattgaggaaactcaggcctgggttccaagtccaacctgggtgacctggagcaaggtagcctctctaagtctcagcatcctgtccagtggagatgagaatcattcctaacccaaagggtggtgggagatttaatcgacacacacacgtaataggtgctccataaatgctactcctcagagaaggcagacagcatgcccaagggcactatggagaaagtggcgtttggcatgagcacgaagacagggctgcagccaggtctccctcaccacatacactttcccagctgcggctgtcttcctccctgcagcaggagctgcttcccacccatctccaggctcacttactacccaccgaagctgctccctcaaagatcccaaacatccattcagtggccctgctgggcccctcgccacagacttgcctgcagcttcggaagctgttttagttctcttgagacagcctccttgtgggttttcctgccttcacccctgcccgcctatgtctgtgttcagtagccaggctgatctcacaagtcaggtcatttcattcctttgcttgacacccttccatggctcccaagctcactcaggaaagccgggagtccctgtaagggtcaccaggtcctgctgtctctctgacctcatctcctactgttccccttctccccctcattccagcagcgagacctctggaaagcctctcaaacgggagcttgctcccgcctcaatacctctgaacatccctttcctgttgcctggatactgtttccccagatctctgcccggctccctctgctcagacctgtttatctgcaaggccatctctgagcactgtggcaataccctgccctccctgttattctctggtccccatcctggtttatttttctttgaagtctttattactgacatatcatgtgtgtacttgttctttatctgtttcccacatttagaatgtttgcttcaggagagcagagactttttgttcacagacatgtttacccaagatctgagcaactggttgatgaatgaatgaactaccttctgtcctcaattcatccacttgttcagcttagtgccctaccctgcactgggctctggggcatctagtcatgataggtaagtccccactcttacactctcacggagcctccggtttaaaggaaaacaggcagtcaataagaatcacaaataaataagcatttgtgcaaatggaggtgttacaaaagagaagtacagcacacaatgataacataaagcatggggacttaaccctagttggataagccagagaggcttttcagaggaggtgacatttgaactgagccctgaaacatgagtgggggactggccagggaaagagcctttcaaacagtgggaacagcacgtgtgaaggcgctgaggaaggagggagcgtcacacatgggaggaacatggaggggacaacagtgtggaagctctagtgatggaggggagaggagggtgggcctgccggcctcattaaggagtctggagtgcatgctctgagtgagcaacagtgagtcaggacgggtctgcagttgggcagggagctggaaccacacaccctctctccagacttcttggtcaagtgatctgtggcctcctactctgctccagctgctgatcctgtgtcttgtgtgggcccctcccttctccccacctctgcatgggcccagccccctctagctcagcaagcccatctccccacctgcagcgtgagtaccaggaccccaagcttcacccgctcaacttgctcatcaccctcttcccacctgaaccagcctcctccagttccacatggccatcaacggccctgccattctcctgtgaccccctgggacagggcagaggggtagtgccatcatccacttctccaacagttacagtcactctagcctcaaagtctctcccatgggagacttgcagtaaattactctgtaagcctcagtttcttctgtttcatcaggggtggggggataatatccacagcctagggttttaaggatacaagaaaagggcctagcacgaagcctggcacagagtcagcttcttccttaaaaacaccctccttcctcatggtccctcacaggcatacatccctgactctcccctgtggttcccattagctcgaattggaactgaatcccacacctctccttcatggcagcctacactcttccttcttcagatgagctacttcgttccttcattaaataagcattcattgggcatttactatgcccttggcacagaaagacaagaaagatctcgtgcctgccccttaagaaggtcgcaatccaattcaaggtggatctacagggattgggtaaaggggttttttgcacacaggcttcggaatcagatctgtgctcaggtcctgtgcctaccactcatttagccttggtttcctcacacaaaaaacaggaataataacaccgcctgcttcacagggctgacgtgcagattaagcgtgatgacacatgctgttccatgtttgaaaggctgttgactggtaaatccttattaaggctgttgactggtaaatccttatataatcagtgctcagtaatactttttatcttaaaggcaaataactgtaatagactatattggatgaagacctcactgctttgatcaagtaatggctggtttacttgcttctgcttctctcactagagagggcagacaacggtaaatgtctgttgaacgaatacagacctgaggtgctacaggagaggcccatagggaccctgaggaggaaaggcatcagagaaattgatctttgagggcctggccccaccctctccgggatcccagggcattttaccacattctgattgtaattacctgtttgctaacatccccactaacgtgagctctctctaaccctggggctattctccaggctgcagcagggcaaaggcggggtcccaacaccatagagaacgccacccctgtccatgctgtcccccacttcaccttttcttggagcggtccttccacactcgccccgatttgggcttccccttcgggattacaggaagctcctctttattcaacttcttggacgctggggcctgggatgaagaaccttttcgcttctttgccccgaagccgcctgtcaccgtctccccagctggaggtggcttgctcggctcatgctgaccccggggggagccaggtgccctgggtgtcagctccagtagtggctgagagggctccggaccgggagcttgctgaccggggtaaggctctggtgatcctgggaccggcggtagctgatgctggggggcccccggggtcagctcctccttattctgggccaactccgaggccagtactccctggtcctgagaacactttggtgcctcctcacttggcttcggctgacatcgtggggattcaggactgtactctggctgtctttgaggcgactccaggtgtaggtcttgctgacgctggggggacgctgcgcctggctctggctgcccttggggtgactccaagcctgcaccctgctgcagacggggtgatcctgggcttgtcttcggcggcctttcgggggaccccaggccagcccgctgcacactcggaggagacccgggctccctcgtttcttctgggttcgactcgaactccacaagggcccgtctcgtccgcgaaactgaggtgaggctctcgggggattcgggccttaggcctcccagccgtcggctgcgccttaacggtgtatccatggctcagccggtaagtttccacacccctgcgcacgtgcagcccccgccgaaaccggcgccttcctatgacgtcaggagtcgccgcgtccgtgacgcacaggaggggggctgttgctgaggcggccatgttggtgaggggtggagaggcgggaccggggttggggagagtggggctcagcatgcgcgtgcgcaattcgcgcgagcgcagtcaacatgtgattgatgagccagtctttttcctgggattcgcttttgcctttcttgcaaagtttcctggggaaagaagagcgagcaagtagaaaagggaaagtgggaggacccatttcagggagagaacagagtcgaaaaaaggtccgaggagcccataggcaaggcccagtggatgttttgcagccaactccggtgcagttgggcagagtcctgccctccttgggcctgttttctcatttgtaataggggtcattttgcactagcttcgtgcatcccaaatgatcctgtcagagtcctcctcccacctacctgagggactgctacctgggggtcctggaggtggaagatcggtcttttctgtgttaattgttcacactcttgattcttccgtcctgtgcttccgtatataatccatagctctccctcccttttcagcgttttcaacgtttgtgagtgaagttgaggtaccaataagatgcaccacctttgtcctgtggctcacctgggccctcgaccagctgcatatcctcccacgtccctcttcttctgccccagttctagaaacgggttggatcatctccgatcttcctttcagcccagacagtggtttttgctcgtgtgtgaacctgcttcgcctcccctcccttcccttgctattcacctgtaaatgtactttgcttactaagcactttgggacctcaccagtgagcaggtgttgacttctggacctcccgaggcctagagaagactctcgggatgtggggttggggaatgtggggctgtggagactttcgtgtgagacctaggagtggggctttgatttacttacagcatgcttcttaggaagaacatcttggaagtggcccagttgtgtaattcttggaactgcctggggttggccattaaaggtcccagggccccgtctgacattccagtggtttcttttagaaaccattgtttctccagctgcgggcttgtgagagggcctgggaaattgtccaagaatatcagggatcagagtgtcctcatcttcctcatgttcctgagtcaaggagacccctgcaggggggctttgcctgcctcactgctcctctccggccatgcagctgtccacagcagaagcagccgggacacctccttgcccagctcttccaccccccaactgtcagaggagtgagttccattcagttccttaaatgccctgcccctgcctggagaccccaatgatctgacactcagaaccaagcccggcaggtgttgccagagtgctggaggagactgtatgcccctctgccctgctccagtcccccttggcttgccttgcctcctaagctcttgtccccagctggagggatcactctccagtgccgattggatcatatcctagtctagcctgaaatacttcagagggtgatctcaggttttcaccagagagagggagatgtgttttagaggaggcctttgggtggcccccagacatttggaggcactttgtcaacctcagcatcagatgggctctggcccagaaccccctactcccacatgagctcaatttgtcattgtcattatacatggtgtgcagaggcccagaggagactcctgaaattttcagaagagcctggtgtggcgatcgctgttgggaccctgtctccttacactcctttgctttcttttaaaaattattattatttttgagacagggtcttgctctgttgtccaggctggagtgcagtggcacaatcacagctcactgcagccttgacctcccaggccccagggatcctcccacctgagtagctggcaccacaggctcatgccaccatgcctggctatttttttttttttgtagaaacggggtctccctgtgttgctcaggctggtcttgaactcctgggctcaagtgatcctcctgcctcggcctcctgaagtgttgggattacaggcgtgagccactgtgcctggccactcctttgcttttattgcagctttctacatcacagctttcttgcctttaggtggtaggatactgaggggcttctctgtagcccccagaggccaccaacaggattgaacttgcattgcccacaaaggtaatctgctcatggaccctcttttggcttcatctctgtctcacttccccactttcttatagatgcttgctgaggtcattctcagagcagacaaatattgtacttaatcctcttctcagagttggcttctgcagaaacctagcctgaaacattggtgccagcaatgattggtccaggcattgtttcaagtactctccaagtacaaatccatttcttaatgcttctcccaacaatcctgtgaggcaggtgcagttgttattactcccagtttacagataaagaaactgagaggctgggtgcgctggctcacacctgtagtaatcccagtactttgggaggccaaggtgggcggatcactggaggccaggagttcaagaccagcctggccaacatgatgaaaccccatctctactaaaagtacaaaaattagctgggtgtggtggcaggcgcctcgagtcccagctactcaggaggctgaggcaggggaattgcttgaacctgggaggtagaggttgcagtgaaccaagatcgtgccactgcacagcaacctgggtggcagagcaagactctgtctcaaaaaaaaaaaaaaaagactgaggcacagagaggctgagacacttgtaaaggtcacacagcaaataagtggtagaggcaagatccacacctagactgtctgattccagagccacaactcttaacagtaaatctgcctgttatccaggcaaggaatcaggcatgggaaggctaaggtgcttgcccaaaatcagacagcggcacattcaggagccaggattgtggttccagaggtggcatgcttagctgccttgcagctgcccccacatgggccttgctcacctattcgtcacactgattctggtctgtgtgctgggaggaggtgggtaccacctggcacacaccatcgtgcagaatgtgccgaatcagcaataccagtttatttatgtaacctgagatctgctgactgatggaaaccaagcgctggcagatggatggaagataggatcaggtgttctcctctgagtcattgacctccccccagctaaggggtgctacagttgagagggtctgacagtccccagatgtcagagacctgggtccccatggctttctgttcaacacctagccttgcctgaaatacttcagagggtgatctcaggttttcaccagagagagggagatgtgttttagaggaggcctttgggtggcccccagacacttggagacactttgtcaacctcagcatcaggtgggctctggcccagaaccccctactcccacctgagctcagtttgtcattgtcattatacatggtgtgcagaggcccagaggagactcctgaaattttcagaagagcctggtgtggtggtgtacttgcagagtgcttgaaacaatgcctggaccaatcattgcttgccccggtgtttcaggctgtgtttctccagaagccaactctgagagaagggcagggaaagggcccctggcggtcatcagcagcattaactgagcacttaccacgcgccagacctcttctgggtgctcctgtgctccccagagctccggttcgggagggtgattttcagcaggagcacggtacttgatatgtatttgttgaatgaat

SEQ ID NO: 128 - DNA, 1250 bp, Homo sapiens
aattcggcacgagggcaggtgcaggcgcacgcggcgagagcgtatggagccgagccgttagcgcgcgccgtcggtgagtcagtccgtccgtccgtccgtccgtcggggcgccgcagctcccgccaggcccagcggccccggcccctcgtctccccgcacccggagccacccggtggagcgggccttgccgcggcagccatgtccatgggcctggagatcacgggcaccgcgctggccgtgctgggctggctgggcaccatcgtgtgctgcgcgttgcccatgtggcgcgtgtcggccttcatcggcagcaacatcatcacgtcgcagaacatctgggagggcctgtggatgaactgcgtggtgcagagcaccggccagatgcagtgcaaggtgtacgactcgctgctggcactgccacaggaccttcaggcggcccgcgccctcatcgtggtggccatcctgctggccgccttcgggctgctagtggcgctggtgggcgcccagtgcaccaactgcgtgcaggacgacacggccaaggccaagatcaccatcgtggcaggcgtgctgttccttctcgccgccctgctcaccctcgtgccggtgtcctggtcggccaacaccattatccgggacttctacaaccccgtggtgcccgaggcgcagaagcgcgagatgggcgcgggcctgtacgtgggctgggcggccgcggcgctgcagctgctggggggcgcgctgctctgctgctcgtgtcccccacgcgagaagaagtacacggccaccaaggtcgtctactccgcgccgcgctccaccggcccgggagccagcctgggcacaggctacgaccgcaaggactacgtctaagggacagacgcagggagaccccaccaccaccaccaccaccaacaccaccaccaccaccgcgagctggagcgcgcaccaggccatccagcgtgcagccttgcctcggaggccagcccacccccagaagccaggaagcccccgcgctggactggggcagcttccccagcagccacggctttgcgggccgggcagtcgacttcggggcccagggaccaacctgcatggactgtgaaacctcacccttctggagcacggggcctgggtgaccgccaatacttgaccaccccgtcgagccccatcgggccgctgcccccatgtcgcgctgggcagggaccggcagccctggaaggggcacttgatatttttcaataaaagcctctcgttttagc

SEQ ID NO: 129 - DNA, 678 bp, Homo sapiens
atggcggcgctggccagtagcctgatccggcagaagcgggaggtccgcgagcccgggggcagccggccggtgtcggcgcagcggcgcgtgtgtccccgcggcaccaagtccctttgccagaagcagctcctcatcctgctgtccaaggtgcgactgtgcggggggcggcccgcgcggccggaccgcggcccggagcctcagctcaaaggcatcgtcaccaaactgttctgccgccagggtttctacctccaggcgaatcccgacggaagcatccagggcaccccagaggataccagctccttcacccacttcaacctgatccctgtgggcctccgtgtggtcaccatccagagcgccaagctgggtcactacatggccatgaatgctgagggactgctctacagttcgccgcatttcacagctgagtgtcgctttaaggagtgtgtctttgagaattactacgtcctgtacgcctctgctctctaccgccagcgtcgttctggccgggcctggtacctcggcctggacaaggagggccaggtcatgaagggaaaccgagttaagaagaccaaggcagctgcccactttctgcccaagctcctggaggtggccatgtaccaggagccttctctccacagtgtccccgaggcctccccttccagtccccctgccccctga

SEQ ID NO: 130 - DNA, 421 bp, Homo sapiens
accccaggaagaagaagaagctggatttactgggcgcagaatgaattccaagatgcaggtgtattctggttccaagtgtgcctatctccctaaaatgatgaccttgcaccagcaatgcatccgagtacttaaaaacaacatcgattcaatctttgaagtgggaggagtcccatactctgttcttgaacccgttttggagaggtgtacacctgatcagctgtatcgcatagaggaataccaatcatgtattaattgaagaaacagatcaattatggaaagttcattgtcaccgagactttaaggaagaaagacccgaagagtatgagtcgtggcgagagatgtacctgcggcttcaggacgccccgagagcagcggctacgaggtactaacaaagaatatccagttcgcacatggccaatta

SEQ ID NO: 131 - DNA, 534 bp, Homo sapiens
atggaaatctgcagaggcctccgcagtcacctaatcactctcctcctcttcctgttccattcagagacgatctgccgaccctctgggagaaaatccagcaagatgcaagccttcagaatctgggatgttaaccagaagaccttctatctgaggaacaaccaactagttgctggatacttgcaaggaccaaatgtcaatttagaagaaaagatagatgtggtacccattgagcctcatgctctgttcttgggaatccatggagggaagatgtgcctgtcctgtgtcaagtctggtgatgagaccagactccagctggaggcagttaacatcactgacctgagcgagaacagaaagcaggacaagcgcttcgccttcatccgctcagacagcggccccaccaccagttttgagtctgccgcctgccccggttggttcctctgcacagcgatggaagctgaccagcccgtcagcctcaccaatatgcctgacgaaggcgtcatggtcaccaaattctacttccaggaggacgagtag

SEQ ID NO: 132 - DNA, 3853 bp, Homo sapiens
acgcgctcacacacagagagaaaatccttctgcctgttgatttatggaaacaattatgattctgctggagaacttttcagctgagaaatagtttgtagctacagtagaaaggctcaagttgcaccaggcagacaacagacatggaattcttatatatccagctgttagcaacaaaacaaaagtcaaatagcaaacagcgtcacagcaactgaacttactacgaactgtttttatgaggatttatcaacagagttatttaaggaggaatcctgtgttgttatcaggaactaaaaggataaggctaacaatttggaaagagcaagtactctttcttaaatcaatctacaattcacagataggaagaggtcaatgacctaggagtaacaatcaactcaagattcattttcattatgttattcatgaacacccggagcactacactataatgcacaaatggatactgacatggatcctgccaactttgctctacagatcatgctttcacattatctgtctagtgggtactatatctttagcttgcaatgacatgactccagagcaaatggctacaaatgtgaactgttccagccctgagcgacacacaagaagttatgattacatggaaggaggggatataagagtgagaagactcttctgtcgaacacagtggtacctgaggatcgataaaagaggcaaagtaaaagggacccaagagatgaagaataattacaatatcatggaaatcaggacagtggcagttggaattgtggcaatcaaaggggtggaaagtgaattctatcttgcaatgaacaaggaaggaaaactctatgcaaagaaagaatgcaatgaagattgtaacttcaaagaactaattctggaaaaccattacaacacatatgcatcagctaaatggacacacaacggaggggaaatgtttgttgccttaaatcaaaaggggattcctgtaagaggaaaaaaaacgaagaaagaacaaaaaacagcccactttcttcctatggcaataacttaattgcatatggtatataaagaacccagttccagcagggagatttctttaagtggactgttttctttcttctcaaaattttctttccttttattttttagtaatcaagaaaggctggaaaaactactgaaaaactgatcaagctggacttgtgcatttatgtttgttttaagacactgcattaaagaaagatttgaaaagtatacacaaaaatcagatttagtaactaaaggttgtaaaaaattgtaaaactggttgtacaatcatgatgttagtaacagtaatttttttcttaaattaatttacccttaagagtatgttagatttgattatctgataatgattatttaaatattcctatctgcttataaaatggctgctataataataataatacagatgttgttatataaggtatatcagacctacaggcttctggcaggatttgtcagataatcaagccacactaactatggaaaatgagcagcattttaaatgctttctagtgaaaaattataatctacttaaactctaatcagaaaaaaaattctcaaaaaaactattatgaaagtcaataaaatagataatttaacaaaagtacaggattagaacatgcttatacctataaataagaacaaaatttctaatgctgctcaagtggaaagggtattgctaaaaggatgtttccaaaaatcttgtatataagatagcaacagtgattgatgataatactgtacttcatcttacttgccacaaaataacattttataaatcctcaaagtaaaattgagaaatctttaagtttttttcaagtaacataatctatctttgtataattcatatttgggaatatggcttttaataatgttcttcccacaaataatcatgcttttttcctatggttacagcattaaactctattttaagttgtttttgaactttattgttttgttatttaagtttatgttatttataaaaaaaaaaccttaataagctgtatctgtttcatatgcttttaattttaaaggaataacaaaactgtctggctcaacggcaagtttccctcccttttctgactgacactaagtctagcacacagcacttgggccagcaaatcctggaagcagacaaaaataagagcctgaagcaatgcttacaatagatgtctcacacagaacaatacaaatatgtaaaaactctttcaccacatattcttgccaattaattggatcatataagtaaaatcattacaaatataagtatttacaggattttaaagttagaatatatttgaatgcatgggtagaaaatatcatattttaaaactatgtatatttaaatttagtaattttctaatctctagaaatctctgctgttcaaaaggtggcagcactgaaagttgttttcctgttagatggcaagagcacaatgcccaaaatagaagatgcagttaagaataaggggccctgaatgtcatgaaggcttgaggtcagcctacagataacaggattattacaaggatgaatttccacttcaaaagtctttcattggcagatcttggtagcactttatatgttcaccaatgggaggtcaatatttatctaatttaaaaggtatgctaaccactgtggttttaatttcaaaatatttgtcattcaagtccctttacataaatagtatttggtaatacatttatagatgagagttatatgaaaaggctaggtcaacaaaaacaatagattcatttaattttcctgtggttgacctatacgaccaggatgtagaaaactagaaagaactgcccttcctcagatatactcttgggagagagcatgaatggtattctgaactatcacctgattcaaggactttgctagctaggttttgaggtcaggcttcagtaactgtagtcttgtgagcatattgagggcagaggaggacttagtttttcatatgtgtttccttagtgcctagcagactatctgttcataatcagttttcagtgtgaattcactgaatgtttatagacaaaagaaaatacacactaaaactaatcttcattttaaaagggtaaaacatgactatacagaaatttaaatagaaatagtgtatatacatataaaatacaagctatgttaggaccaaatgctctttgtctatggagttatacttccatcaaattacatagcaatgctgaattaggcaaaaccaacatttagtggtaaatccattcctggtagtataagtcacctaaaaaagacttctagaaatatgtactttaattatttgtttttctcctatttttaaatttattatgcaaattttagaaaataaaatttgctctagttacacacctttagaattctagaatattaaaactgtaaggggcctccatccctcttactcatttgtagtctaggaaattgagattttgatacacctaaggtcacgcagctgggtagatatacagctgtcacaagagtctagatcagttagcacatgctttctactcttcgattattagtattattagctaatggtctttggcatgtttttgttttttatttctgttgagatatagcctttacatttgtacacaaatgtgactatgtcttggcaatgcacttcatacacaatgactaatctatactgtgatgatttgactcaaaaggagaaaagaaattatgtagttttcaattctgattcctattcaccttttgtttatgaatggaaagctttgtgcaaaatatacatataagcagagtaagccttttaaaaatgttctttgaaagataaaattaaatacatgagtttctaacaattaga

SEQ ID NO: 133 - DNA, 2271 bp, Homo sapiens
cgccgccacccggcagccccggcgcagctccggcagccgcagtcgcagcgcccccagcgtggcgccccccggccgggcctgccgcccgggacccgggctggggcgcagagggagcccggagcccggcgcccccatgcgccgccccgccgccgccgcgccacagctatgaccctgagcactgagatgtccgatgcctctggcctcgccgaggaaacagacatcgacgtggtgggggagggcgaggacgaagaagacgaggaagaggaggacgacgacgagggcggcggtggcgggccccggctggctgtccccgcgcagcggcggcggcggcggcgctcgtacgccggggaggacgagctggaggatctggaggaggaggaggacgacgatgacatcctgctggccccgcctgctggggctccccggcgcccccgggcccggccccggcggcgggggcaggagccggtgggggcggcggcggcggcggcgcgggcggcggcgggagcgcgggtagcggcgccaagaacccgctggtgaagccgccctactcgtatatcgcgctcatcactatggccatcctgcagagccccaagaagcggctgacgctgagcgagatctgtgagttcatcagcggccgcttcccctactaccgggagaagttccccgcctggcagaacagcatccgccacaacctctcgctcaacgactgcttcgtcaagatcccccgcgagcccggcaacccgggcaagggcaactactggacgctggacccggagtccgccgacatgttcgacaacggcagcttcctgcgccggaggaagcgcttcaagcggcagccgctgctcccacccaacgccgcggccgccgagtctctgctgctgcgcggcgcgggagccgcagggggcgcgggcgacccggcagccgccgccgcgctcttcccgcccgcgcccccgccgcccccgcatgcctacggctacggcccctacggctgcggctacggcctgcagctgccgccttacgcgccgccctcggccctcttcgccgccgcagcggccgccgccgccgccgccgccttccacccgcactcgcccccgccgcccccgccaccgcacggcgcggccgccgagctggcccggaccgccttcggctaccggccgcacccgctcggcgccgccctacccggccccctgccggcctccgcggccaaggcgggcggcccgggcgcctcagcgctggcgcgctcgcccttctccatcgagagcatcatcgggggcagcttgggcccggccgccgctgccgccgccgccgcgcaggccgccgccgccgctcaggcctcgccctcgccctcgccggtggcggcgccgccagctcccggatccagcggaggaggctgcgcggcgcaggcggccgtgggcccggcggccgcgctcacccgatccctcgtggccgccgcggccgccgccgcctcctcagtctcctcgtccgccgccttggggactctgcaccaagggactgccctgtccagtgtcgagaactttactgctaggatttccaattgttaataacgctatgttagcgcgctcgaggaagaaggtaggaatcccggctccttttctcgtcttggtggttcggtgttttgttcgctcctccaggcgcggcccctctcgacctcgcgcgcccattttcgccgctgcgaattctcggacaaaactgtcaacagcccgggcgcgccttttggctctgcgggtccctctatttatgcaaagccgacctatgctacagccccccaacccccgacctggggtagggaggaagagggtgccggggaagggagtccgccctgtccaggcactagaggctcccttgacgtttggcagatgaaaaacaactaagcctttttgaggtgtagagattctcaggtccaggcgttaaaaaataatggtcaaaagaataatacaaaaatagtaaaggtcttgaagaatgccagcgaagcaattcttttttatttgaggacacttgtctggtgtactttttcatgaaaaggaaaaatggttaacatgtttacacaagaaaaaaagtcaaaattatcatttatttcaacctgtgttttgtatcataacagacgtgtggatttttttgtacttactgcgtattctttacaaggagtattgtaaattttactggcaattattattgtactattctaaatgtaagatttttacactttttcagaaataaaaatgcttaattttcaaagaaaattcaccaaaa

SEQ ID NO: 134 - DNA, 3887 bp, Homo sapiens
aagcttccgcgagtttcccaggcatttctcctcgcgggactaccaggggtagtgggacacttagcctctctaaaagcacctccacggctgtttgtgtcaagcctttattccaagagcttcacttttgcgaagtaatgtgcttcacacattggcttcaaagtacccatggctggttgcaataaacattaaggaggcctgtctctgcacccggagttggtgccctcatttcagatgatttcgagggtgcttgacaagatctgaaggaccctcggactttagagcaccacctcggaacgcctggcacccctgccgcgcgggcacggcgacctcctcagctgccaggccagcctctgatccccgcgaggggtcccgtagtgctgcagggggaggctggggacccgaataaaggagcagtttccccgtcggtgccattatccgacgctggctctaaggctcggccagtctgtctaaagctggtacaagtttgctttgtaaaacaaaagaagggaaagggggaaggggaccctggcacagatttggctcgacctggacataggctgggctgcaagtccgcggggaccgggtccagaggggcagtgctgggaacgcccctctcggaaattaactcctcagggcaccgctcccctcccatgcgccgccccactcccgccggagactaggtcccgcgggggccaccgtgtccaccgcctcgcggccgctggccttgggtccccgctgctggttctcctccctcctcctcgcattctcctcctcctctgctcctcccgatccctcctccgccgcctggtccctcctcctcccgccctgcctcccgcgcctcggcccgcgcgagctagacgtccgggcagcccccggcgcagcgcggccgcagcagcctcctccccccgcacggtgtgagcgcccgccgcgccgaggcggccggagtcccgagctagccccgcggccgccgccgcccagaccggacgacaggccacctcgtcgcgtccgcccgagtccccgcctcgccgccaacgccacaaccaccgcgcacggccccctgactccgtccagtattgatcgggagagccggagcgagctcttcggggagcagcgatgcgaccctccgggacggccggggcagcgctcctggcgctgctggctgcgctctgcccggcgagtcgggctctggaggaaaagaaaggtaagggcgtgtctcgcggctccccgccgcccccggatcgcgccccggaccccgcagcccgcccaaccgcaccgcgcaccggcttcgcccgcgcccccgcccgtcctttcctgtttccttgagatcacgtgcgccgccgaccgggaccgcgggaggaacgggacgtttcgttcttcggccgggagagtctggggcgggcggaggaggagacgcgtgggacaccgggctgcaggccaggcggggaacggccgccgggacctccggcgccccgaaccgctcccaactttcttccctcactttccccgcccagctgcgcaggatcggcgtcagtgggcgaaagccgggtgctggtgggcgcctggggccggggtcccgcacgggctccccgcgctgtcttcccagggcgcgacggggtcctggcgcgcacccgagggccgctgcccacccgccgagactgcctgtttagggaagctgaggaaggaacccaaaaatacagcctccgctcggaccccgcgggacaggcggctttctgagaggacctccccgcctccgcgctccgcgcaggtctcaaactgaagccggcgcccgccagcctggccccggcccctctccaggtccccgcgatcctcgttccccagtgtggagtcgcagcctcgacctgggagctgggagaactcgtctaccaccacctgcggctcccggggaggggtggtgctggcggcggttagtttcctcgttggcaaaaggcaggtggggtccgacccgccccttgggcgcagaccccggccgctcgcctcgcccggtgcgccctcgtcttgcctatccaagagtgccccccactcccgggaccccagctccctccgcgcccgcgccgaaagccccaggctctccttcgatggccgcctcgcggagacgtccgggtctgctccacctgcagcccttcggtcgcgcctgggcttcgcggtggagcgggacgcggctgtccggccactgcagggggggatcgcgggactcttgagcggaagccccggaagcagagctcatcctggccaacaccatggtgtttcaaaatggggctcacagcaaacttctcctcaaaacccggagactttctttcttggatgtctctttttgctgtttgaagaatttgagccaaccaaaatattaaacctgtcttacacacacacacacacacacacacacacacacaccggattgctgtccctggttcaagtgtgccaagtgtgcagaagaacatgagcgagtctggcttcgtgactaccgaccataaacccacttgacaggggaaacatgccttggaaggtttaattgcacaattccaaccttgactgcgcgggttccaagagccaggcccgtacttgctgttgatgtcattggcttggggagttggggtttggtgcccagcgcggtcgttgggggaggggcggaaggcatagaacagtggttccctgcgcccttctgcacattggaattacctgggattaaaaaaaaaaaatcaaaacaaaaaccagtgtctcgtcccgcccccagacattctgatttaattggcatggggcaagacctggacttgggattttttttaatgctcttcatgtgatctgttgggcagccagatttggggatcactagacggaagaaggattgttaaagtctccggagatgttacttgccaatgctaagagctctttgagacatctggaattgttacaatattgccaaatataggaaagagggaaaaggtagagtgtgattccaataataaaggattccgcttttcattgaaggaactggtggaaaggtttcttctctgctagacctgcaggcccgtcctgcctgcctggggcgcccgggagacgcgggcctgctccggagactgctgactgccggtcctgttagtcaggtgtcagccctgtctctgccgaagagactctctctttattttaaattaaaccctcagagcaccaccaaagcatcacttttctccctccattggtgttctcattctttgatgttacttgtttgaacaccactattagtagttggagatttgttcctgagaaaaatataaataccacttaatttgcctgtttgtcccgcattcactcaaaacagaatgctcctgaagacaagagagagagtaggagaacagacgctattccattacagtaacataaaagactggattttcaggggcaaattattaaaataggagatgagctcttttaacagaaatttgtttaaggcctgtgtctatcaaattcagtggattttattcaagatgcactttgtttagtgggagttttgtttggttctgggacatgctaacttctagacttgctgctcttagaggtaatgactgccagacaccatttcatgagtcctaatccccacattaagcataagaggtgcacactctcctcctatgggggaaactgaggtacgaagaactaaagtgactttcccacagctggtgggaggcagacgggaaattcacaccaggggcttccaactccagatccctctctcaacttccaaactccactgccttgtccgagttctggtttcaggagatccaaatcaggtgtgtgcaaatgtctaatgtcagagctggcaaggggaaagggcccagggagccggctcatgacgatgagcctgtctgaagctt

SEQ ID NO: 135 - DNA, 402 bp, Homo sapiens
cagtctgttgagttagttaagttgggttaataccagcttaaaggcagtattttgtgtcctccaggagcttcttgtttccttgttagggttaacccttcatcttcctgtgtcctgaaacgctcctttgtgtgtgtgtcagctgaggctgggggagagccgtggtccctgaggatgggtcagagctaaactccttcctggcctgagagtcagctctctgccctgtgtacttcccgggccagggctgcccctaatctctgtaggaaccgtggtatgtctgccatgttgcccctttctcttttcccctttcctgtcccaccatacgagcacctccagcctgaacagaagctcttactctttcctatttcagtgttacctgtgtgcttggtctgtttgactttacgc

SEQ ID NO: 136 - DNA, 1842 bp, Homo sapiens
ccacagtggcgccggcagagcaggagtggctggaggagctgtggttggagcaggaggtggcacggcagggctggagggctccctatgagtggcggagacggcccaggaggcgctggagcaacagctcccacaccgcaccaagcggtggctgcaggagctcgcccatcgcccctgcgctgctcggaccgcggccacagccggactggcgggtacggcggcgacagacggattggccgagagtcccagtccgcagagtagccccggcctcgaggcggtggcgtcccggtcctctccgtccaggagccaggacaggtgtcgcgcggcggggctccagggaccgcgcctgaggccggctgcccgcccgtcccgccccgccccgccgcccgccgcccgccgagcccagcctccttgccgtcggggcgtccccaggccctgggtcggccgcggagccgatgcgcgcccgctgagcgccccagctgagcgcccccggcctgccatgaccgcgctccccggcccgctctggctcctgggcctggcgctatgcgcgctgggcgggggcggccccggcctgcgacccccgcccggctgtccccagcgacgtctgggcgcgcgcgagcgccgggacgtgcagcgcgagatcctggcggtgctcgggctgcctgggcggccccggccccgcgcgccacccgccgcctcccggctgcccgcgtccgcgccgctcttcatgctggacctgtaccacgccatggccggcgacgacgacgaggacggcgcgcccgcggagcggcgcctgggccgcgccgacctggtcatgagcttcgttaacatggtggagcgagaccgtgccctgggccaccaggagccccattggaaggagttccgctttgacctgacccagatcccggctggggaggcggtcacagctgcggagttccggatttacaaggtgcccagcatccacctgctcaacaggaccctccacgtcagcatgttccaggtggtccaggagcagtccaacagggagtctgacttgttctttttggatcttcagacgctccgagctggagacgagggctggctggtgctggatgtcacagcagccagtgactgctggttgctgaagcgtcacaaggacctgggactccgcctctatgtggagactgaggacgggcacagcgtggatcctggcctggccggcctgctgggtcaacgggccccacgctcccaacagcctttcgtggtcactttcttcagggccagtccgagtcccatccgcacccctcgggcagtgaggccactgaggaggaggcagccgaagaaaagcaacgagctgccgcaggccaaccgactcccagggatctttgatgacgtccacggctcccacggccggcaggtctgccgtcggcacgagctctacgtcagcttccaggacctcggctggctggactgggtcatcgctccccaaggctactcggcctattactgtgagggggagtgctccttcccactggactcctgcatgaatgccaccaaccacgccatcctgcagtccctggtgcacctgatgaagccaaacgcagtccccaaggcgtgctgtgcacccaccaagctgagcgccacctctgtgctctactatgacagcagcaacaacgtcatcctgcgcaagcaccgcaacatggtggtcaaggcctgcggctgccactgagtcagcccgcccagccctactgcagccacccttctcatctggatcgggccctgcagaggcagaaaacccttaaatgctgtcacagctcaagcaggagtgtcaggggccctcactctctgtgcctacttcctgtcagg

SEQ ID NO: 137 - DNA, 4879 bp, Homo sapiens
accaattcgccagcggttcaggtggctcttgcctcgatgtcctagcctaggggcccccgggccggacttggctgggctcccttcaccctctgcggagtcatgagggcgaacgacgctctgcaggtgctgggcttgcttttcagcctggcccggggctccgaggtgggcaactctcaggcagtgtgtcctgggactctgaatggcctgagtgtgaccggcgatgctgagaaccaataccagacactgtacaagctctacgagaggtgtgaggtggtgatggggaaccttgagattgtgctcacgggacacaatgccgacctctccttcctgcagtggattcgagaagtgacaggctatgtcctcgtggccatgaatgaattctctactctaccattgcccaacctccgcgtggtgcgagggacccaggtctacgatgggaagtttgccatcttcgtcatgttgaactataacaccaactccagccacgctctgcgccagctccgcttgactcagctcaccgagattctgtcagggggtgtttatattgagaagaacgataagctttgtcacatggacacaattgactggagggacatcgtgagggaccgagatgctgagatagtggtgaaggacaatggcagaagctgtcccccctgtcatgaggtttgcaaggggcgatgctggggtcctggatcagaagactgccagacattgaccaagaccatctgtgctcctcagtgtaatggtcactgctttgggcccaaccccaaccagtgctgccatgatgagtgtgccgggggctgctcaggccctcaggacacagactgctttgcctgccggcacttcaatgacagtggagcctgtgtacctcgctgtccacagcctcttgtctacaacaagctaactttccagctggaacccaatccccacaccaagtatcagtatggaggagtttgtgtagccagctgtccccataactttgtggtggatcaaacatcctgtgtcagggcctgtcctcctgacaagatggaagtagataaaaatgggctcaagatgtgtgagccttgtgggggactatgtcccaaagcctgtgagggaacaggctctgggagccgcttccagactgtggactcgagcaacattgatggatttgtgaactgcaccaagatcctgggcaacctggactttctgatcaccggcctcaatggagacccctggcacaagatccctgccctggacccagagaagctcaatgtcttccggacagtacgggagatcacaggttacctgaacatccagtcctggccgccccacatgcacaacttcagtgttttttccaatttgacaaccattggaggcagaagcctctacaaccggggcttctcattgttgatcatgaagaacttgaatgtcacatctctgggcttccgatccctgaaggaaattagtgctgggcgtatctatataagtgccaataggcagctctgctaccaccactctttgaactggaccaaggtgcttcgggggcctacggaagagcgactagacatcaagcataatcggccgcgcagagactgcgtggcagagggcaaagtgtgtgacccactgtgctcctctgggggatgctggggcccaggccctggtcagtgcttgtcctgtcgaaattatagccgaggaggtgtctgtgtgacccactgcaactttctgaatggggagcctcgagaatttgcccatgaggccgaatgcttctcctgccacccggaatgccaacccatggagggcactgccacatgcaatggctcgggctctgatacttgtgctcaatgtgcccattttcgagatgggccccactgtgtgagcagctgcccccatggagtcctaggtgccaagggcccaatctacaagtacccagatgttcagaatgaatgtcggccctgccatgagaactgcacccaggggtgtaaaggaccagagcttcaagactgtttaggacaaacactggtgctgatcggcaaaacccatctgacaatggctttgacagtgatagcaggattggtagtgattttcatgatgctgggcggcacttttctctactggcgtgggcgccggattcagaataaaagggctatgaggcgatacttggaacggggtgagagcatagagcctctggaccccagtgagaaggctaacaaagtcttggccagaatcttcaaagagacagagctaaggaagcttaaagtgcttggctcgggtgtctttggaactgtgcacaaaggagtgtggatccctgagggtgaatcaatcaagattccagtctgcattaaagtcattgaggacaagagtggacggcagagttttcaagctgtgacagatcatatgctggccattggcagcctggaccatgcccacattgtaaggctgctgggactatgcccagggtcatctctgcagcttgtcactcaatatttgcctctgggttctctgctggatcatgtgagacaacaccggggggcactggggccacagctgctgctcaactggggagtacaaattgccaagggaatgtactaccttgaggaacatggtatggtgcatagaaacctggctgcccgaaacgtgctactcaagtcacccagtcaggttcaggtggcagattttggtgtggctgacctgctgcctcctgatgataagcagctgctatacagtgaggccaagactccaattaagtggatggcccttgagagtatccactttgggaaatacacacaccagagtgatgtctggagctatggtgtgacagtttgggagttgatgaccttcggggcagagccctatgcagggctacgattggctgaagtaccagacctgctagagaagggggagcggttggcacagccccagatctgcacaattgatgtctacatggtgatggtcaagtgttggatgattgatgagaacattcgcccaacctttaaagaactagccaatgagttcaccaggatggcccgagacccaccacggtatctggtcataaagagagagagtgggcctggaatagcccctgggccagagccccatggtctgacaaacaagaagctagaggaagtagagctggagccagaactagacctagacctagacttggaagcagaggaggacaacctggcaaccaccacactgggctccgccctcagcctaccagttggaacacttaatcggccacgtgggagccagagccttttaagtccatcatctggatacatgcccatgaaccagggtaatcttggggagtcttgccaggagtctgcagtttctgggagcagtgaacggtgcccccgtccagtctctctacacccaatgccacggggatgcctggcatcagagtcatcagaggggcatgtaacaggctctgaggctgagctccaggagaaagtgtcaatgtgtagaagccggagcaggagccggagcccacggccacgcggagatagcgcctaccattcccagcgccacagtctgctgactcctgttaccccactctccccacccgggttagaggaagaggatgtcaacggttatgtcatgccagatacacacctcaaaggtactccctcctcccgggaaggcaccctttcttcagtgggtcttagttctgtcctgggtactgaagaagaagatgaagatgaggagtatgaatacatgaaccggaggagaaggcacagtccacctcatccccctaggccaagttcccttgaggagctgggttatgagtacatggatgtggggtcagacctcagtgcctctctgggcagcacacagagttgcccactccaccctgtacccatcatgcccactgcaggcacaactccagatgaagactatgaatatatgaatcggcaacgagatggaggtggtcctgggggtgattatgcagccatgggggcctgcccagcatctgagcaagggtatgaagagatgagagcttttcaggggcctggacatcaggccccccatgtccattatgcccgcctaaaaactctacgtagcttagaggctacagactctgcctttgataaccctgattactggcatagcaggcttttccccaaggctaatgcccagagaacgtaactcctgctccctgtggcactcagggagcatttaatggcagctagtgcctttagagggtaccgtcttctccctattccctctctctcccaggtcccagccccttttccccagtcccagacaattccattcaatctttggaggcttttaaacattttgacacaaaattcttatggtatgtagccagctgtgcactttcttctctttcccaaccccaggaaaggttttccttattttgtgtgctttcccagtcccattcctcagcttcttcacaggcactcctggagatatgaaggattactctccatatcccttcctctcaggctcttgactacttggaactaggctcttatgtgtgcctttgtttcccatcagactgtcaagaagaggaaagggaggaaacctagcagaggaaagtgtaattttggtttatgactcttaaccccctagaaagacagaagcttaaaatctgtgaagaaagaggttaggagtagatattgattactatcataattcagcacttaactatgagccaggcatcatactaaacttcacctacattatctcacttagtcctttatcatccttaaaacaattctgtgacatacatattatctcattttacacaaagggaagtcgggcatggtggctcatgcctgtaatctcagcactttgggaggctgaggcagaaggattacctgaggcaaggagtttgagaccagcttagccaacatagtaagacccccatctcttt

SEQ ID NO: 138 - DNA, 393 bp, Homo sapiens
  modified_base (230): a, t, c, g, other or unknown
  modified_base (294): a, t, c, g, other or unknown
  modified_base (306): a, t, c, g, other or unknown
  modified_base (363): a, t, c, g, other or unknown
  modified_base (376): a, t, c, g, other or unknown
atctaacattattgctttaggaaagtatttccctgaaccaagaatacaatgctaattgcataaaaacatacacatataaaaagtagttctccattttcccaggaaaaaatccaagtataacttctagaatagtcaagtttcttatttttattataattaaagtcttggtcatttcatttattagctctgcaacttacatatttaaattaaagaaacgttattagacaacngttacaatttataaatgtaaggtgccattattgagtaaatatattcctccaagagtggatgtgncccttctcccancaactaatgaagcagcaacattaggttaaatttattaggagatgatacactggctgnaaacgctaattcnccttctccaaccccaag

SEQ ID NO: 139 - DNA, 2481 bp, Homo sapiens
cgaacttggggggagtgcacagaagaacttcgggagcgcacgcgggaccagggaccaggctgagactcggggcgccagtccgggcaggggcagcgggagccggccggagatgccctgtatccaagcccaatatgggacaccagcaccgagtccgggaccccgtgaccacctggcaagcgaccccctgacccctgagttcatcaagcccaccatggacctggccagccccgaggcagcccccgctgcccccactgccctgcccagcttcagcaccttcatggacggctacacaggagagtttgacaccttcctctaccagctgccaggaacagtccagccatgctcctcagcctcctcctcggcctcctccacatcctcgtcctcagccacctcccctgcctctgcttccttcaagttcgaggacttccaggtgtacggctgctaccccggccccctgagcggcccagtggatgaggccctgtcctccagtggctctgactactatggcagcccctgctcggccccgtcgccctccacgcccagcttccagccgccccagctctctccctgggatggctccttcggccacttctcgcccagccagacttacgaaggcctgcgggcatggacagagcagctgcccaaagcctctgggcccccacagcctccagccttcttttccttcagtcctcccaccggccccagccccagcctggcccagagccccctgaagttgttcccctcacaggccacccaccagctgggggagggagagagctattccatgcctacggccttcccaggtttggcacccacttctccacaccttgagggctcggggatactggatacacccgtgacctcaaccaaggcccggagcggggccccaggtggaagtgaaggccgctgtgctgtgtgtggggacaacgcttcatgccagcattatggtgtccgcacatgtgagggctgcaagggcttcttcaagcgcacagtgcagaaaaacgccaagtacatctgcctggctaacaaggactgccctgtggacaagaggcggcgaaaccgctgccagttctgccgcttccagaagtgcctggcggtgggcatggtgaaggaagttgtccgaacagacagcctgaaggggcggcggggccggctaccttcaaaacccaagcagcccccagatgcctcccctgccaatctcctcacttccctggtccgtgcacacctggactcagggcccagcactgccaaactggactactccaagttccaggagctggtgctgccccactttgggaaggaagatgctggggatgtacagcagttctacgacctgctctccggttctctggaggtcatccgcaagtgggcggagaagatccctggctttgctgagctgtcaccggctgaccaggacctgttgctggagtcggccttcctggagctcttcatcctccgcctggcgtacaggtctaagccaggcgagggcaagctcatcttctgctcaggcctggtgctacaccggctgcagtgtgcccgtggcttcggggactggattgacagtatcctggccttctcaaggtccctgcacagcttgcttgtcgatgtccctgccttcgcctgcctctctgcccttgtcctcatcaccgaccggcatgggctgcaggagccgcggcgggtggaggagctgcagaaccgcatcgccagctgcctgaaggagcacgtggcagctgtggcgggcgagccccagccagccagctgcctgtcacgtctgttgggcaaactgcccgagctgcggaccctgtgcacccagggcctgcagcgcatcttctacctcaagctggaggacttggtgccccctccacccatcattgacaagatcttcatggacacgctgcccttctgacccctgcctgcctgggaacacgtgtgcacatgcgcactctctcatatgccaccccatgtgcctttagtccacggaccccagagcacccccaagcctgggcttagctgcagaacagagggacctgctcacctgcccaaaggggatgaagggagggaggctcaaggcccttgggggagggggatgccttcatgggggtgacccacgatgtgttcttatcccccccgcctggccaccggcctttatgttttttgtaagataaaccgtttttaacacatagcgccgtgctgtaaataagcccagtactgctgtaaatacaggaagaaagagcttgaggtgggagcgggctgggaggaagggatgggccccggccttcctgggcagcctttccagcctcctgctgggctctctcttcctaccctccttccacatgtacatgtacataaactgtcactctaggaagaagacaaatgacagattctgaccatttatatttgtgtattttccaggatttatagtatgtgacttttctgattaatatatttaatatattgaataaaaaatagacatgtagttgg

SEQ ID NO: 140 - DNA, 2382 bp, Homo sapiens
ggggccgccccttccccgcgccgcagccgcctcgccgccaccgccgcgagctcggccgccagtggtcctcggactttaggtgtctgggttgaaggaggtttgtctccgaggaagacccagggaactggatatctagcgagaacttcctccggattccccggcgcctcgggaaaatgggagctgctgcaaagttggcgtttgccgtctttcttatctcctgttcttcaggtgctatacttggtagatcagaaactcaggagtgtcttttctttaatgctaattgggaaaaagacagaaccaatcaaactggtgttgaaccgtgttatggtgacaaagataaacggcggcattgttttgctacctggaagaatatttctggttccattgaaatagtgaaacaaggttgttggctggatgatatcaactgctatgacaggactgattgtgtagaaaaaaaagacagccctgaagtatatttttgttgctgtgagggcaatatgtgtaatgaaaagttttcttattttccggagatggaagtcacacagcccacttcaaatccagttacacctaagccaccctattacaacatcctgctctattccttggtgccacttatgttaattgcggggattgtcatttgtgcattttgggtgtacaggcatcacaagatggcctaccctcctgtacttgttccaactcaagacccaggaccacccccaccttctccattactaggtttgaaaccactgcagttattagaagtgaaagcaaggggaagatttggttgtgtctggaaagcccagttgcttaacgaatatgtggctgtcaaaatatttccaatacaggacaaacagtcatggcaaaatgaatacgaagtctacagtttgcctggaatgaagcatgagaacatattacagttcattggtgcagaaaaacgaggcaccagtgttgatgtggatctttggctgatcacagcatttcatgaaaagggttcactatcagactttcttaaggctaatgtggtctcttggaatgaactgtgtcatattgcagaaaccatggctagaggattggcatatttacatgaggatatacctggcctaaaagatggccacaaacctgccatatctcacagggacatcaaaagtaaaaatgtgctgttgaaaaacaacctgacagcttgcattgctgactttgggttggccttaaaatttgaggctggcaagtctgcaggcgatacccatggacaggttggtacccggaggtacatggctccagaggtattagagggtgctataaacttccaaagggatgcatttttgaggatagatatgtatgccatgggattagtcctatgggaactggcttctcgctgtactgctgcagatggacctgtagatgaatacatgttgccatttgaggaggaaattggccagcatccatctcttgaagacatgcaggaagttgttgtgcataaaaaaaagaggcctgttttaagagattattggcagaaacatgctggaatggcaatgctctgtgaaaccattgaagaatgttgggatcacgacgcagaagccaggttatcagctggatgtgtaggtgaaagaattacccagatgcagagactaacaaatattattaccacagaggacattgtaacagtggtcacaatggtgacaaatgttgactttcctcccaaagaatctagtctatgatggttgcgccatctgtgcacactaagaaatgggactctgaactggagctgctaagctaaagaaactgcttacagtttattttctgtgtaaaatgagtaggatgtctcttggaaatgttaagaaagaagaccctttgttgaaaaatgttgctctgggagacttactgcattgccgacagcacagatgtgaaggacatgagactaagagaaaccttgcaaactctataaagaaacttttgaaaaagtgtacatgaagaatgtagccctctccaaatcaaggatcttttggacctggctaatggagtgtttgaaaactgacatcagatttcttaatgtctgtcagaagacactaattccttaaatgaactactgctattttttttaaatcaaaaacttttcatttcagattttaaaaagggtaacttgtttttattgcatttgctgttgtttctataaatgactattgtaatgccaatatgacacagcttgtgaatgtttagtgtgctgctgttctgtgtacataaagtcatcaaagtggggtacagtaaagaggcttccaagcattactttaacctccctcaacaaggtatacctcagttccacggttgctaaattataaaattgaaaacactaacaaaatttgaataataaatcgatccatgtttccc

SEQ ID NO: 141 - DNA, 274 bp, Homo sapiens
aacatatcttgctacgaaacaatggcagatgctccactgagcttcagcaagtcatcctgatctccgtgggaacattttcgttgctgtcggtgctggcaggagcctgtttcttcctggtcctgaaatatagaggcctgattaaatactggtttcacactccaccaagcatcccattacagatagaagagtatttaaaagacccaactcagcccatcttagaggccttggacaaggacagctcaccaaaggatgacgtctgggactctgtgtccat

SEQ ID NO: 142 - DNA, 440 bp, Homo sapiens
gccgctccttgggctacgcgtatgtgaacttccagcagccggcggatccggacgtgcatttggacaccatgaattttgatgttataaagggcaagccagtacgcatcatgtggtctcagcgtgatccatcacttcgcaaaagtggagtaggcaacatattcattaaaaatctggacaaatccattgataataaagcactgtatgatacattttctgcttttggtaacatcctttcatgtaaggtggtttgtgatgaaaatggttccaagggctatggatttgtacactttgagacgcaggaagcagctgaaagagctattgaaaaaatgaatggaatgctcctaaatgatcgcaaagtatttgttggacgatttaagtctcgtaaagaacgagaagctgaacttggagctagggcaaaagaattccacaatgtttacatc

SEQ ID NO: 143 - DNA, 1209 bp, Homo sapiens
gagggaggggcgcggagccccggcgcggagccgggcgcggggctttgatggatttagctgcttgcgcgagcgcgtgtgtgctccctgccgcagcggcggcgcccgggccctgccgggtccgcacgaaccccgagcgcttccgaggtgcgggtcccaggcccggaatccgggggaggcgggggggggggggcgggggcgggggcgggggaggggcgcggcggcggcgctataaccctctccccgccgccggccggctccacacgcgcgccctgcggagcccgcccaactccggcgagccgggcctgcgcctactcctcctcctcctctcccggcggcggctgcggcggaggcgccgactcggccttgcgcccgccctcaggcccgcgcgggcggcgcagcgaggccccgggcggcgggtggtggctgccaggcggctcggccgcgggcgctgcccggccccggcgagcggagggcggagcgcggcgccggagccgagggcgcgccgcggagggggtgctgggccgcgctgtgcccggccgggcggcggctgcaagaggaggccggaggcgagcgcggggccggcggtgggcgcgcagggcggctcgcagctcgcagccggggccgggccaggcgttcaggcaggtgatcggtgtggcggcggcggcggcggcggccccagactccctccggagttcttcttggggctgatgtccgcaaatatgcagaattaccggccgggtcgctcctgaagccagcgcggggagcgagcgcggcggcggccagcaccgggaacgcaccgaggaagaagcccagcccccgccctccgccccttccgtccccaccccctacccggcggcccaggaggctccccgcgctgcgggcgcgcactccctgtttctcctcctcctggctggcgctgcctgcctctccgcactcactgctcgcgccgggcgcgctccgccagctccgtgctccccgcgccaccctcctccgggccgcgctccctaagggatggtactgaatttcgccgccacaggagaccggctggagcgcccgccccgcggcctcgcctctcctccgagcagccagcgcctcgggacgcgatgaggaccttggcttgcctgctgctcctcggctgcggatacctcgcccatgttctggccgaggttggtgccgcccccgcgccccgtccctgcgccggctcctccg

SEQ ID NO: 144 - DNA, 80 bp, Homo sapiens
ttgtggaaaactcaacctttattattacctgcctagtgcaggggattaaaattgcctcaagctaggtccatatattagtg

SEQ ID NO: 145 - DNA, 1386 bp, Homo sapiens
gccccatctccttgggctgcccgtgcttcgtgctttggactaccgcccagcagtgtcctgccctctgcctgggcctcggtccctcctgcacctgctgcctggatccccggcctgcctgggcctgggccttggttctccccatgacaccacctgaacgtctcttcctcccaagggtgtgtggcaccaccctacacctcctccttctggggctgctgctggttctgctgcctggggcccaggggctccctggtgttggcctcacaccttcagctgcccagactgcccgtcagcaccccaagatgcatcttgcccacagcaccctcaaacctgctgctcacctcattggagaccccagcaagcagaactcactgctctggagagcaaacacggaccgtgccttcctccaggatggtttctccttgagcaacaattctctcctggtccccaccagtggcatctacttcgtctactcccaggtggtcttctctgggaaagcctactctcccaaggccacctcctccccactctacctggcccatgaggtccagctcttctcctcccagtaccccttccatgtgcctctcctcagctcccagaagatggtgtatccagggctgcaggaaccctggctgcactcgatgtaccacggggctgcgttccagctcacccagggagaccagctatccacccacacagatggcatcccccacctagtcctcagccctagtactgtcttctttggagccttcgctctgtagaacttggaaaaatccagaaagaaaaaataattgatttcaagaccttctccccattctgcctccattctgaccatttcaggggtcgtcaccacctctcctttggccattccaacagctcaagtcttccctgatcaagtcaccggagctttcaaagaaggaattctaggcatcccaggggaccacacctccctgaaccatccctgatgtctgtctggctgaggatttcaagcctgcctaggaattcccagcccaaagctgttggtctgtcccaccagctaggtggggcctagatccacacacagaggaagagcaggcacatggaggagcttgggggatgactagaggcagggaggggactatttatgaaggcaaaaaaattaaattatttatttatggaggatggagagaggggaataatagaagaacatccaaggagaaacagagacaggcccaagagatgaagagtgagagggcatgcgcacaaggctgaccaagagagaaagaagtaggcatgagggatcacagggccccagaaggcagggaaaggctctgaaagccagctgccgaccagagccccacacggaggcatctgcaccctcgatgaagcccaataaacctcttttctctg

SEQ ID NO: 146 - DNA, 456 bp, Homo sapiens
  modified_base (125): a, t, c, g, other or unknown
  modified_base (345): a, t, c, g, other or unknown
  modified_base (386): a, t, c, g, other or unknown
  modified_base (391): a, t, c, g, other or unknown
  modified_base (408): a, t, c, g, other or unknown
  modified_base (439): a, t, c, g, other or unknown
  modified_base (455): a, t, c, g, other or unknown
aaaaggaagctgtctcgggcattgaacaaagctaaaaactccagtgatgccaaactagaaccaacaaatgtccaaaccgtaacctgttctcctcgtgtaaaagccctgcctctcagccccagganacgtctgggcgatgacaacctatgcaacactccccatttacctccttgttctccaccaaagcaaggcaagaaagagaatggtccccctcactcacatacacttaagggacgaagattggtatttgacaatcagctgacaattaagtctcctagcaaaagagaactagccaaagttcaccaaaacaaaatactttctttcagttaggaaaaagtcaagggnttcacaacaaatttttgaggcaggggtgtccactgaagganaggantctggctgcgtggggantatttcaaggcaagaagggcatttgctaccngcaggcaaagttggtnc

SEQ ID NO: 147 - DNA, 420 bp, Homo sapiens
ttaaggaagaacatattttaatggttgaaacctgtctttatgaggcgattatgacagcaaaaaatattataatgaataacaatgcatagtctacgctttgtaatatttcatacaataattcctttatcatttacatctcttaatgctagaaaagcattctgaagatgccaagcgtaagttgcaactgagtaaaaaaaaaaaagcaaaatttactcaatttccagaagaggtgcagaacagagaatgaaggtccttaaaatataaaccgctagtgtgctaaaatgatgtccatttgcaggatcagtggacaaaatatttaagcccataaagaaaagagttatacctgctgtatgaaggtattccatagagaaatatgagtcataagccaattatttataaatggccttccaaatatttggt

SEQ ID NO: 148 - DNA, 593 bp, Homo sapiens
  modified_base (122): a, t, c, g, other or unknown
  modified_base (135)..(136): a, t, c, g, other or unknown
  modified_base (141): a, t, c, g, other or unknown
  modified_base (207): a, t, c, g, other or unknown
  modified_base (209): a, t, c, g, other or unknown
  modified_base (215): a, t, c, g, other or unknown
  modified_base (555): a, t, c, g, other or unknown
  modified_base (565): a, t, c, g, other or unknown
ctgtcctcggagcaggcggagtaaagggacttgagcgagccagttgccggattattctatttcccctccctctctcccgccccgtatctcttttcacccttctcccaccctcgctcgcgtancatggcggacgtnnggcgnccactcagtcccattccatctcctcgtcgtccttcggagccgagccgtccgcgcccggcgcggcgngnagccanggagcctgccccgccctggggacgaagagctgcagctcctcctgtgcggtgcagattctgattttctggagagatgtgaagaagactgggtttgtctttggcaccacgctgatcatgctgctttccctggcagctttcagtgtcatcagtgtggatttcttacctcatcctggctcttctctctgtcaccatcagcttcaggatctacaagtccgtcatccaagctgtacagaagtcagaagaaggccatccattcaaagcctactggacgtagacattactctgtctagaagtttcataattacatgaatgtgcatgtgacataacagggcctgaaacnatattcgttntttggtagaaattggttgatcttgaagt

SEQ ID NO: 149 - DNA, 1682 bp, Homo sapiens
agagaggaaggcgtggctccctcccgggccagtgagccctggcgccgccgcggccgcggtcccagcagcggagtagggcggcggctgcgccccgcaccatggggggcagcccagccccagccgcggtaaacgccgacctccgccgccgcccgcgccgcgtctgccccctcccgctgcggctctctggacgccatcccctcctcacctcgaagccaacatgaaggagacccggggctacggaggggatgcccccttctgcacccgcctcaaccactcctacacaggcatgtgggcgcccgagcgttccgccgaggcgcggggcaacctcacgcgccctccagggtctggcgaggattgcggatcggtgtccgtggccttcccgatcaccatgctgctcactggtttcgtgggcaacgcactggccatgctgctcgtgtcgcgcagctaccggcgccgggagagcaagcgcaagaagtccttcctgctgtgcatcggctggctggcgctcaccgacctggtcgggcagcttctcaccaccccggtcgtcatcgtcgtgtacctgtccaagcagcgttgggagcacatcgacccgtcggggcggctctgcacctttttcgggctgaccatgactgttttcgggctctcctcgttgttcatcgccagcgccatggccgtcgagcgggcgctggccatcagggcgccgcactggtatgcgagccacatgaagacgcgtgccacccgcgctgtgctgctcggcgtgtggctggccgtgctcgccttcgccctgctgccggtgctgggcgtgggccagtacaccgtccagtggcccgggacgtggtgcttcatcagcaccgggcgagggggcaacgggactagctcttcgcataactggggcaaccttttcttcgcctctgcctttgccttcctggggctcttggcgctgacagtcaccttttcctgcaacctggccaccattaaggccctggtgtcccgctgccgggccaaggccacggcatctcagtccagtgcccagtggggccgcatcacgaccgagacggccattcagcttatggggatcatgtgcgtgctgtcggtctgctggtctccgctcctgataatgatgttgaaaatgatcttcaatcagacatcagttgagcactgcaagacacacacggagaagcagaaagaatgcaacttcttcttaatagctgttcgcctggcttcactgaaccagatcttggatccttgggtttacctgctgttaagaaagatccttcttcgaaagttttgccaggtagcaaatgctgtctccagctgctctaatgatggacagaaagggcagcctatctcattatctaatgaaataatacagacagaagcatgaaagaaaacacttaacttgcatgtgcacagcttctggtaacaaatatcgctaaaccttactgtgaatttaggcatctctggcatgccactgtttatgcattgaagtggaatttttggtataaagctaaatggtcttagaagcatagaaaatccctatgtgccaaaagtagtgaaacacaaacaaaggaaaatatattaataacagtctagtgtttttgttgagtctgccattcgtagctgaatatgtgattaattatgtgatgaaaactttttttataaatgatcttggtctattgggg

SEQ ID NO: 150 - DNA, 2311 bp, Homo sapiens
gatttaatcctatgacaaactaagttggttctgtcttcacctgttttggtgaggttgtgtaagagttggtgtttgctcaggaagagatttaagcatgcttgcttacccagactcagagaagtctccctgttctgtcctagctatgttcctgtgttgtgtgcattcgtcttttccagagcaaaccgcccagagtagaagatggattggggcacgctgcagacgatcctggggggtgtgaacaaacactccaccagcattggaaagatctggctcaccgtcctcttcatttttcgcattatgatcctcgttgtggctgcaaaggaggtgtggggagatgagcaggccgactttgtctgcaacaccctgcagccaggctgcaagaacgtgtgctacgatcactacttccccatctcccacatccggctatgggccctgcagctgatcttcgtgtccagcccagcgctcctagtggccatgcacgtggcctaccggagacatgagaagaagaggaagttcatcaagggggagataaagagtgaatttaaggacatcgaggagatcaaaacccagaaggtccgcatcgaaggctccctgtggtggacctacacaagcagcatcttcttccgggtcatcttcgaagccgccttcatgtacgtcttctatgtcatgtacgacggcttctccatgcagcggctggtgaagtgcaacgcctggccttgtcccaacactgtggactgctttgtgtcccggcccacggagaagactgtcttcacagtgttcatgattgcagtgtctggaatttgcatcctgctgaatgtcactgaattgtgttatttgctaattagatattgttctgggaagtcaaaaaagccagtttaacgcattgcccagttgttagattaagaaatagacagcatgagagggatgaggcaacccgtgctcagctgtcaaggctcagtcgccagcatttcccaacacaaagattctgaccttaaatgcaaccatttgaaacccctgtaggcctcaggtgaaactccagatgccacaatgagctctgctcccctaaagcctcaaaacaaaggcctaattctatgcctgtcttaattttctttcacttaagttagttccactgagaccccaggctgttaggggttattggtgtaaggtactttcatattttaaacagaggatatcggcatttgtttctttctctgaggacaagagaaaaaagccaggttccacagaggacacagagaaggtttgggtgtcctcctggggttctttttgccaactttccccacgttaaaggtgaacattggttctttcatttgctttggaagttttaatctctaacagtggacaaagttaccagtgccttaaactctgttacactttttggaagtgaaaactttgtagtatgataggttattttgatgtaaagatgttctggataccattatatgttccccctgtttcagaggctcagattgtaatatgtaaatggtatgtcattcgctactatgatttaatttgaaatatggtcttttggttatgaatactttgcagcacagctgagagaggctgtctgttgtattcattgtggtcatagcacctaacaacattgtagcctcaatcgagtgagacagactagaagttcctagttggcttatgatagcaaatggcctcatgtcaaatattagatgtaattttgtgtaagaaatacagactggatgtaccaccaactactacctgtaatgacaggcctgtccaacacatctcccttttccatgctgtggtagccagcatcggaaagaacgctgatttaaagaggtgagcttgggaattttattgacacagtaccatttaatggggagacaaaaatgggggccaggggagggagaagtttctgtcgttaaaaacgagtttggaaagactggactctaaattctgttgattaaagatgagctttgtctaccttcaaaagtttgtttggcttacccccttcagcctccaattttttaagtgaaaatataactaataacatgtgaaaagaatagaagctaaggtttagataaatattgagcagatctataggaagattgaacctgaatattgccattatgcttgacatggtttccaaaaaatggtactccacatacttcagtgagggtaagtattttcctgttgtcaagaatagcattgtaaaagcattttgtaataataaagaatagctttaatgatatgcttgtaactaaaataattttgtaatgtatcaaatacatttaaaacattaaaatataatctctataat

SEQ ID NO: 151 - DNA, 472 bp, Homo sapiens
cagaggcttggaggggatgtgcagagccccaactgcccatctgaggatgtagtcatcactccagaaagctttggaagagattcatccctcacatgcctggctgggaatgtcagtgcatgtgacgcccctattctctcctcttccaggtccctagactgcagggagagtggcaagaatgggcctcatgtgtaccaggacctcctgcttagccttgggactacaaacagcacgctgccccctccattttctctccaatctggaatcctgacattgaacccagttgctcagggtcagcccattcttacttccctgggatcaaatcaagaagaagcatatgtcaccatgtccagcttctaccaaaaccagtgaagtgtaagaaaaccccagaactgaacttaccgtgagcgaccaaagatgatttaaaaagggaagtctagagttcctagtctccctaacagcaccagagaagaca

SEQ ID NO: 152 - DNA, 253 bp, Homo sapiens
tgcctgtaagaaacatgatataactgtcaaaaggacagaaagtcagctacatcaatggcaagatgtgagtagtaggttccgtttgtaccaggacagtgcagaaatggcaaattttccctcaatatgaaaaaaagaaacaaagaaaatctatgagaagtgccaccacatggacagaccacccctcccgcgggcatgtggtctgcagcccctgcccgtttccaacaaccttcctcactaacaggctttctccttc

SEQ ID NO: 153 - DNA, 1106 bp, Homo sapiens
ttgctgaaataaaacacaagtatctctggtcagagcctcagaattgctcagccaccaaaagtaactaccttcgaggtactggtccctacccaccttccgtggactggcggaaaaaaggaaattttgtctcacctgtgaaaaatcagggtgcctgcggcagttgctggactttctccaccactggggccctggagtctgcaatcgccatcgcaaccggaaagatgctgtccttggcggaacagcagctggtggactgcgcccaggacttcaataattacggctgccaagggggtctccccagccaggctttcgagtatatcctgtacaacaaggggatcatgggtgaagacacctacccctaccagggcaaggatggttattgcaagttccaacctggaaaggccatcggctttgtcaaggatgtagccaacatcacaatctatgacgaggaagcgatggtggaggctgtggccctctacaaccctgtgagctttgcctttgaggtgactcaggacttcatgatgtatagaacgggcatctactccagtacttcctgccataaaactccagataaagtaaaccatgcagtactggctgttgggtatggagaaaaaaatgggatcccttactggatcgtgaaaaactcttggggtccccagtggggaatgaacgggtacttcctcatcgagcgcggaaagaacatgtgtggcctggctgcctgcgcctcctaccccatccctctggtgtgagccgtggcagccgcagcgcagactggcggagaaggagaggaacgggcagcctgggcctgggtggaaatcctgccctggaggaagttgtggggagatccactgggacccccaacattctgccctcacctctgtgcccagcctggaaacctacagacaaggaggagttccaccatgagctcacccgtgtctatgacgcaaagatcaccagccatgtgccttagtgtccttcttaacagactcaaaccacatggaccacgaatattctttctgtccagaagggctactttccacatatagagctccagggactgtcttttctgtattcgctgttcaataaacattgagtgagcacctcca

SEQ ID NO: 154 - DNA, 521 bp, Homo sapiens
tttttctggactgaagcctgcaggagttaaaaagggcagggcatctcctgtgcatgggtgaagggagggccagctcccccgacggtgggcatttgtgaggcccatggttgagaaatgaataatttcccaattaggaagtgtaacagctgaggtctcttgagggagcttagccaatgtgggagcagcggtttggggagcagagacactaacgacttcagggcagggctctgatattccatgaatgtatcaggaaatatatatgtgtgtgtatgtttgcacacttgtgtgtgggctgtgagtgtaagtgtgagtaagagctggtgtctgattgttaagtctaaatatttccttaaactggcgtggactgtgatgccacacagagttgtctttctgggagaggttataggtcacccctggggccttcttggtcccccacgtgacagtggctgggaatgtattagtcctcagcatgacctgtgacaacactgtctcaagttcctttcacatagatgtccgttctt

SEQ ID NO: 155 - DNA, 4637 bp, Homo sapiens
aggtgaacaggtcctcacgcccagctccgccccctcacgcgctctcgccgggaccccgcttccgctggcagccatgggccccggccccagccgcgcgccccgcgccccacgcctgatgctctgtgcgctcgccttgatggtggcggccggcggctgcgtcgtctccgccttcaacctggatacccgattcctggtagtgaaggaggccgggaacccgggcagcctcttcggctactcggtcgccctccatcggcagacagagcggcagcagcgctacctgctcctggctggtgccccccgggagctcgctgtgcccgatggctacaccaaccggactggtgctgtgtacctgtgcccactcactgcccacaaggatgactgtgagcggatgaacatcacagtgaaaaatgaccctggccatcacattattgaggacatgtggcttggagtgactgtggccagccagggccctgcaggcagagttctggtctgtgcccaccgctacacccaggtgctgtggtcagggtcagaagaccagcggcgcatggtgggcaagtgctacgtgcgaggcaatgacctagagctggactccagtgatgactggcagacctaccacaacgagatgtgcaatagcaacacagactacctggagacgggcatgtgccagctgggcaccagcggtggcttcacccagaacactgtgtacttcggcgcccccggtgcctacaactggaaaggaaacagctacatgattcagcgcaaggagtgggacttatctgagtatagttacaaggacccagaggaccaaggaaacctctatattgggtacacgatgcaggtaggcagcttcatcctgcaccccaaaaacatcaccattgtgacaggtgccccacggcaccgacatatgggcgcggtgttcttgctgagccaggaggcaggcggagacctgcggaggaggcaggtgctggagggctcgcaggtgggcgcctattttggcagcgcaattgccctggcagacctgaacaatgatgggtggcaggacctcctggtgggcgccccctactacttcgagaggaaagaggaagtagggggtgccatctatgtcttcatgaaccaggcgggaacctccttccctgctcacccctcactccttcttcatggccccagtggctctgcctttggtttatctgtggccagcattggtgacatcaaccaggatggatttcaggatattgctgtgggagctccgtttgaaggcttgggcaaagtgtacatctatcacagtagctctaaggggctccttagacagccccagcaggtaatccatggagagaagctgggactgcctgggttggccaccttcggctattccctcagtgggcagatggatgtggatgagaacttctacccagaccttctagtgggaagcctgtcagaccacattgtgctgctgcgggcccggccagtcatcaacatcgtccacaagaccttggtgcccaggccagctgtgctggaccctgcactttgcacggccacctcttgtgtgcaagtggagctgtgctttgcttacaaccagagtgccgggaaccccaactacaggcgaaacatcaccctggcctacactctggaggctgacagggaccgccggccgccccggctccgctttgccggcagtgagtccgctgtcttccacggcttcttctccatgcccgagatgcgctgccagaagctggagctgctcctgatggacaacctccgtgacaaactccgccccatcatcatctccatgaactactctttacctttgcggatgcccgatcgcccccggctggggctgcggtccctggacgcctacccgatcctcaaccaggcacaggctctggagaaccacactgaggtccagttccagaaggagtgcgggcctgacaacaagtgtgagagcaacttgcagatgcgggcagccttcgtgtcagagcagcagcagaagctgagcaggctccagtacagcagagacgtccggaaattgctcctgagcatcaacgtgacgaacacccggacctcggagcgctccggggaggacgcccacgaggcgctgctcaccctggtggtgcctcccgccctgctgctgtcctcagtgcgcccccccggggcctgccaagctaatgagaccatcttttgcgagctggggaaccccttcaaacggaaccagaggatggagctgctcatcgcctttgaggtcatcggggtgaccctgcacacaagggaccttcaggtgcagctgcagctctccacgtcgagtcaccaggacaacctgtggcccatgatcctcactctgctggtggactatacactccagacctcgcttagcatggtaaatcaccggctacaaagcttctttggggggacagtgatgggtgagtctggcatgaaaactgtggaggatgtaggaagccccctcaagtatgaattccaggtgggcccaatgggggaggggctggtgggcctggggaccctggtcctaggtctggagtggccctacgaagtcagcaatggcaagtggctgctgtatcccacggagatcaccgtccatggcaatgggtcctggccctgccgaccacctggagaccttatcaaccctctcaacctcactctttctgaccctggggacaggccatcatccccacagcgcaggcgccgacagctggatccagggggaggccagggccccccacctgtcactctggctgctgccaaaaaagccaagtctgagactgtgctgacctgtgccacagggcgtgcccactgtgtgtggctagagtgccccatccctgatgcccccgttgtcaccaacgtgactgtgaaggcacgagtgtggaacagcaccttcatcgaggattacagagactttgaccgagtccgggtaaatggctgggctaccctattcctccgaaccagcatccccaccatcaacatggagaacaagaccacgtggttctctgtggacattgactcggagctggtggaggagctgccggccgaaatcgagctgtggctggtgctggtggccgtgggtgcagggctgctgctgctggggctgatcatcctcctgctgtggaagtgcggcttcttcaagcgagcccgcactcgcgccctgtatgaagctaagaggcagaaggcggagatgaagagccagccgtcagagacagagaggctgaccgacgactactgagggggcagccccccgcccccggcccacctggtgtgacttctttaagcggacccgctattatcagatcatgcccaagtaccacgcagtgcggatccgggaggaggagcgctacccacctccagggagcaccctgcccaccaagaagcactgggtgaccagctggcagactcgggaccaatactactgacgtcctccctgatcccaccccctcctcccccagtgtcccctttcttcctatttatcataagttatgcctctgacagtccacaggggccaccacctttggctggtagcagcaggctcaggcacatacacctcgtcaagagcatgcacatgctgtctggccctggggatcttcccacaggagggccagcgctgtggaccttacaacgccgagtgcactgcattcctgtgccctagatgcacgtggggcccactgctcgtggactgtgctggtgcatcacggatggtgcatgggctcgccgtgtctcagcctctgccagcgccagcgccaaaacaagccaaagagcctcccaccagagccgggaggaaaaggcccctgcaatgtggtgacacctcccctttcacacctggatccatcttgagagccacagtcactggattgactttgctgtcaaaactactgacagggagcagcccccgggccgctggctggtgggcccccaattgacacccatgccagagaggtggggatcctgcctaaggttgtctacgggggcacttggaggacctggcgtgctcagacccaacagcaaaggaactagaaagaaggacccagaaggcttgctttcctgcatctctgtgaagcctctctccttggccacagactgaactcgcagggagtgcagcaggaaggaacaaagacaggcaaacggcaacgtagcctgggctcactgtgctggggcatggcgggatcctccacagagaggaggggaccaattctggacagacagatgttgggaggatacagaggagatgccacttctcactcaccactaccagccagcctccagaaggccccagagagaccctgcaagaccacggagggagccgacacttgaatgtagtaataggcagggggccctgccaccccatccagccagaccccagctgaaccatgcgtcaggggcctagaggtggagttcttagctatccttggctttctgtgccagcctggctctgcccctcccccatgggctgtgtcctaaggcccatttgagaagctgaggctagttccaaaaacctctcctgacccctgcctgttggcagcccactccccagccccagccccttccatggtactgtagcaggggaattccctccccctccttgtgccttctttgtatataggcttctcaccgcgaccaataaacagctcccagtttgt

SEQ ID NO: 156 - DNA, 3386 bp, Homo sapiens
gccgcggccagctccggcgggcagggggggcgctggagcgcagcgcagcgcagccccatcagtccgcaaagcggaccgagctggaagtcgagcgctgccgcgggaggcgggcgatgggggcaggtgccaccggccgcgccatggacgggccgcgcctgctgctgttgctgcttctgggggtgtcccttggaggtgccaaggaggcatgccccacaggcctgtacacacacagcggtgagtgctgcaaagcctgcaacctgggcgagggtgtggcccagccttgtggagccaaccagaccgtgtgtgagccctgcctggacagcgtgacgttctccgacgtggtgagcgcgaccgagccgtgcaagccgtgcaccgagtgcgtggggctccagagcatgtcggcgccgtgcgtggaggccgacgacgccgtgtgccgctgcgcctacggctactaccaggatgagacgactgggcgctgcgaggcgtgccgcgtgtgcgaggcgggctcgggcctcgtgttctcctgccaggacaagcagaacaccgtgtgcgaggagtgccccgacggcacgtattccgacgaggccaaccacgtggacccgtgcctgccctgcaccgtgtgcgaggacaccgagcgccagctccgcgagtgcacacgctgggccgacgccgagtgcgaggagatccctggccgttggattacacggtccacacccccagagggctcggacagcacagcccccagcacccaggagcctgaggcacctccagaacaagacctcatagccagcacggtggcaggtgtggtgaccacagtgatgggcagctcccagcccgtggtgacccgaggcaccaccgacaacctcatccctgtctattgctccatcctggctgctgtggttgtgggccttgtggcctacatagccttcaagaggtggaacagctgcaagcagaacaagcaaggagccaacagccggccagtgaaccagacgcccccaccagagggagaaaaactccacagcgacagtggcatctccgtggacagccagagcctgcatgaccagcagccccacacgcagacagcctcgggccaggccctcaagggtgacggaggcctctacagcagcctgcccccagccaagcgggaggaggtggagaagcttctcaacggctctgcgggggacacctggcggcacctggcgggcgagctgggctaccagcccgagcacatagactcctttacccatgaggcctgccccgttcgcgccctgcttgcaagctgggccacccaggacagcgccacactggacgccctcctggccgccctgcgccgcatccagcgagccgacctcgtggagagtctgtgcagtgagtccactgccacatccccggtgtgagcccaaccggggagcccccgccccgccccacattccgacaaccgatgctccagccaacccctgtggagcccgcacccccaccctttggggggggcccgcctggcagaactgagctcctctgggcaggacctcagagtccaggccccaaaaccacagccctgtcagtgcagcccgtgtggccccttcacttctgaccacacttcctgtccagagagagaagtgcccctgctgcctccccaaccctgcccctgccccgtcaccatctcaggccacctgcccccttctcccacactgctaggtgggccagcccctcccaccacagcaggtgtcatatatggggggccaacaccagggatggtactagggggaagtgacaaggccccagagactcagagggaggaatcgaggaaccagagccatggactctacactgtgaacttggggaacaagggtggcatcccagtggcctcaaccctccctcagcccctcttgccccccaccccagcctaagatgaagaggatcggaggcttgtcagagctgggaggggttttcgaagctcagcccacccccctcattttggatataggtcagtgaggcccagggagaggccatgattcgcccaaagccagacagcaacggggaggccaagtgcaggctggcaccgccttctctaaatgaggggcctcaggtttgcctgagggcgaggggagggtggcaggtgaccttctgggaaatggcttgaagccaagtcagctttgccttccacgctgtctccagacccccaccccttccccactgcctgcccacccgtggagatgggatgcttgcctagggcctggtccatgatggagtcaggtttggggttcgtggaaagggtgctgcttccctctgcctgtccctctcaggcatgcctgtgtgacatcagtggcatggctccagtctgctgccctccatcccgacatggacccggagctaacactggcccctagaatcagcctaggggtcagggaccaaggacccctcaccttgcaacacacagacacacgcacacacacacacaggaggagaaatctcacttttctccatgagttttttctcttgggctgagactggatactgcccggggcagctgccagagaagcatcggagggaattgaggtctgctcggccgtcttcactcgcccccgggtttggcgggccaaggactgccgaccgaggctggagctggcgtctgtcttcaagggcttacacgtggaggaatgctcccccatcctccccttccctgcaaacatggggttggctgggcccagaaggttgcgatgaagaaaagcgggccagtgtgggaatgcggcaagaaggaattgacttcgactgtgacctgtggggatttctcccagctctagacaaccctgcaaaggactgttttttcctgagcttggccagaagggggccatgaggcctcagtggactttccaccccctccctggcctgttctgttttgcctgaagttggagtgagtgtggctcccctctatttagcatgacaagccccaggcaggctgtgcgctgacaaccaccgctccccagcccagggttcccccagccctgtggaagggactaggagcactgtagtaaatggcaattctttgacctcaacctgtgatgaggggaggaaactcacctgctggcccctcacctgggcacctggggagtgggacagagtctgggtgtatttattttcctccccagcaggtggggagggggtttggtggcttgcaagtatgttttagcatgtgtttggttctggggcccctttttactccccttgagctgagatggaacccttttggcccccagctgggggccatgagctccagacccccagcaaccctcctatcacctcccctccttgcctcctgtgtaatcatttcttgggccctcctgaaacttacacacaaaacgttaagtgatgaacattaaatagcaaag

SEQ ID NO: 157 - DNA, 2848 bp, Homo sapiens
  modified_base (1887)..(2179): a, t, c, g, other or unknown
cacgagccctggggaggcgcgcagcagaggctccgattcggggcaggtgagaggctgactttctctcggtgcgtccagtggagctctgagtttcgaatcggtggcggcggattccccgcgcgcccggcgtcggggcttccaggaggatgcggagccccagcgcggcgtggctgctgggggccgccatcctgctagcagcctctctctcctgcagtggcaccatccaaggaaccaatagatcctctaaaggaagaagccttattggtaaggttgatggcacatcccacgtcactgggaaaaggagttacagttgaaacagtcttttctgtggatgagttttctgcatctgtcctcactggaaaactgaccactgtcttccttccaattgtctacacaattgtgtttgtggtggggtttgcaagtaacggcatggccctgtgggtctttcttttccgaactaagaagaagcaccctgctgtgatttacatggccaatctggccttggctgacctcctctctgtcatctggttccccttgaagattgcctatcacatacatggcaacaactggatttatggggaagctctttgtaatgtgcttattggctttttctatggcaacatgtactgttccattctcttcatgacctgcctcagtgtgcagaggtattgggtcatcgtgaaccccatggggcactccaggaagaaggcaaacattgccattggcatctccctggcaatatggctgctgattctgctggtcaccatccctttgtatgtcgtgaagcagaccatcttcattcctgccctgaacatcacgacctgtcatgatgttttgcctgagcagctcttggtgggagacatgttcaattacttcctctctctggccattggggtctttctgttcccagccttcctcacagcctctgcctatgtgctgatgatcagaatgctgcgatcttctgccatggatgaaaactcagagaagaaaaggaagagggccatcaaactcattgtcactgtcctggccatgtacctgatctgcttcactcctagtaaccttctgcttgtggtgcattattttctgattaagagccagggccagagccatgtctatgccctgtacattgtagccctctgcctctctacccttaacagctgcatcgacccctttgtctattactttgtttcacatgatttcagggatcatgcaaagaacgctctcctttgccgaagtgtccgcactgtaaagcagatgcaagtatccctcacctcaaagaaacactccaggaaatccagctcttactcttcaagttcaaccactgttaagacctcctattgagttttccaggtcctcagatgggaattgcacagtaggatgtggaacctgtttaatgttatgaggacgtgtctgttatttcctaatcaaaaaggtctcaccacataccatgtggatgcagcacctctcaggattgctaggagctcccctgtttgcatgagaaaagtagtcccccaaattaacatcagtgtctgtttcagaatctctctactcagatgaccccagaaactgaaccaacagaagcagacttttcagaagatggtgaagacagaaacccagtaacttgcaaaaagtagacttggtgtgaagactcacttctcagctgaaattatatatatacacatatatatattttacatctgggatcatgatagacttgttagggcttcaaggccctcagagatgatcagtccaactgaacgaccttacaaatgaggaaaccaagataaatgagctgccagaatcaggtttccaatcaacagcagtgagttgggattggacagtagaatttcaatgtccagtgagtgaggttcttgtaccacttcatcnnnnnnnnnnnnnnnnnnnnnnnnnnnnnnnnnnnnnnnnnnnnnnnnnnnnnnnnnnnnnnnnnnnnnnnnnnnnnnnnnnnnnnnnnnnnnnnnnnnnnnnnnnnnnnnnnnnnnnnnnnnnnnnnnnnnnnnnnnnnnnnnnnnnnnnnnnnnnnnnnnnnnnnnnnnnnnnnnnnnnnnnnnnnnnnnnnnnnnnnnnnnnnnnnnnnnnnnnnnnnnnnnnnnnnnnnnnnnnnnnnnnnnnnnnnnnnnnnnnnnnnnnnnnnnnnnnnnnnnnnnnnnnnnnnnnntaaaatagtcgtgaatcttgttcaaaatgcagattcctcagattcaataatgagagctcagactgggaacagggcccaggaatctgtgtggtacaaacctgcatggtgtttatgcacacagagatttgagaaccattgttctgaatgctgcttccatttgacaaagtgccgtgataatttttgaaaagagaagcaaacaatggtgtctcttttatgttcagcttataatgaaatctgtttgttgacttattaggactttgaattatttctttattaaccctctgagtttttgtatgtattattattaaagaaaaatgcaatcaggattttaaacatgtaaatacaaattttgtataacttttgatgacttcagtgaaattttcaggtagtctgagtaatagattgttttgccacttagaatagcatttgccacttagtattttaaaaaataattgttggagtatttattgtcagttttgttcacttgttatctaatacaaaattataaagccttcagagggtttggaccacatctctttggaaaatagtttgcaacatatttaagagatacttgatgccaaaatgactttatacaacgattgtatttgtgacttttaaaaataattattttattgtgtaattgatttataaataacaaaatttttttac

SEQ ID NO: 158 - DNA, 222 bp, Homo sapiens
  modified_base (22): a, t, c, g, other or unknown
  modified_base (42): a, t, c, g, other or unknown
  modified_base (109): a, t, c, g, other or unknown
  modified_base (172): a, t, c, g, other or unknown
agcacaccaaggagtgattttnaaaacttactctgttttctntttcccaacaagattatcatttcctttaaaaaaaatagttatcctggggcatacagccataccattntgaaggtgtcttatctcctctgatctagagagcaccatgaagcttctcacgggcctggttttntgctccttggtcctgggtgtcagcagccgaagcttcttttcgttccttgg

SEQ ID NO: 159 - DNA, 1475 bp, Homo sapiens
tccacctgtccccgcagcgccggctcgcgccctcctgccgcagccaccgagccgccgtctagcgccccgacctcgccaccatgagagccctgctggcgcgcctgcttctctgcgtcctggtcgtgagcgactccaaaggcagcaatgaacttcatcaagttccatcgaactgtgactgtctaaatggaggaacatgtgtgtccaacaagtacttctccaacattcactggtgcaactgcccaaagaaattcggagggcagcactgtgaaatagataagtcaaaaacctgctatgaggggaatggtcacttttaccgaggaaaggccagcactgacaccatgggccggccctgcctgccctggaactctgccactgtccttcagcaaacgtaccatgcccacagatctgatgctcttcagctgggcctggggaaacataattactgcaggaacccagacaaccggaggcgaccctggtgctatgtgcaggtgggcctaaagccgcttgtccaagagtgcatggtgcatgactgcgcagatggaaaaaagccctcctctcctccagaagaattaaaatttcagtgtggccaaaagactctgaggccccgctttaagattattgggggagaattcaccaccatcgagaaccagccctggtttgcggccatctacaggaggcaccgggggggctctgtcacctacgtgtgtggaggcagcctcatcagcccttgctgggtgatcagcgccacacactgcttcattgattacccaaagaaggaggactacatcgtctacctgggtcgctcaaggcttaactccaacacgcaaggggagatgaagtttgaggtggaaaacctcatcctacacaaggactacagcgctgacacgcttgctcaccacaacgacattgccttgctgaagatccgttccaaggagggcaggtgtgcgcagccatcccggactatacagaccatctgcctgccctcgatgtataacgatccccagtttggcacaagctgtgagatcactggctttggaaaagagaattctaccgactatctctatccggagcagctgaagatgactgttgtgaagctgatttcccaccgggagtgtcagcagccccactactacggctctgaagtcaccaccaaaatgctgtgtgctgctgacccacagtggaaaacagattcctgccagggagactcagggggacccctcgtctgttccctccaaggccgcatgactttgactggaattgtgagctggggccgtggatgtgccctgaaggacaagccaggcgtctacacgagagtctcacacttcttaccctggatccgcagtcacaccaaggaagagaatggcctggccctctgagggtccccagggaggaaacgggcaccacccgctttcttgctggttgtcatttttgcagtagagtcatctccatcagctgtaagaagagactgggaagat

SEQ ID NO: 160 - DNA, 258 bp, Homo sapiens
ggctcagcctggagggacccaaccagagcctggcctgggagccaggatggccatccacaaagccttggtgatgtgcctgggactgcctctcttcctgttcccaggggcctgggcccagggccatgtcccacccggctgcagccaaggcctcaagcccctgtactacaacctgtgtgaccgctctggggcgtggggcatcgtcctggacgccgttgctggggcgggcattgtcaccacgtttgtgctcaccatcatcct

SEQ ID NO: 161 - DNA, 288 bp, Homo sapiens
gctcgcgtcgcatttggccgcctccctaccgctccaagcccagccctcagccatggcatgccccctggatcaggccattggcctcctcgtggccatcttccacaagtactccggcagggagggtgacaagcacaccctgagcaagaaggagctgaaggagctgatccagaaggagctcaccattggctcgaagctgcaggatgctgaaattgcaaggctgatggaagacttggaccggaacaaggaccaggaggtgaacttccaggagtatgtcaccttcctgggggc

SEQ ID NO: 162 - DNA, 313 bp, Homo sapiens
tctttaaaggctttatttgcattcttgtaaattttattatttcaagtcaatgtgttaagaattactgcgcatatagttatttcttttataaatttgttttccgtgattccttcaaaagctttcttattgttggcctttattttctgcagagaagactacagttttacagcttatgctaccatttcgtatttgaaaataggacctaaagctaatcttctgaacaatgaggcacatgctattactatgcaagtgacaaagtccacgcagaactctttcagggtaaatggctattaattttcagttttatatattt

SEQ ID NO: 163 - DNA, 401 bp, Homo sapiens
  modified_base (131)..(188): a, t, c, g, other or unknown
  modified_base (272): a, t, c, g, other or unknown
ctggttcaatttttacaggaattcagtaagataaatactattctctgaattcaaaaaacaacttcttcagggccacaaaacactggggataaagacaagaagaactacagcaggggtccccacctactcgnnnnnnnnnnnnnnnnnnnnnnnnnnnnnnnnnnnnnnnnnnnnnnnnnnnnnnnnnnaggtgattctgatcggatgttacatagccatatccaggtacatccacaaatccagcaggcaattcataagtcagtcaagccganagcgaaaacataaccagagcatcagggttgttgtggctgtgttttttacctgctttctatcatatcacttgtgcagaattccttttacttttagtcacttagactaggcttttagatgaatctgcacaa

SEQ ID NO: 164 - DNA, 328 bp, Homo sapiens
  modified_base (20): a, t, c, g, other or unknown
  modified_base (22): a, t, c, g, other or unknown
caattcaggcaacaggagcnangggccaggaaagaacaccaccctttcacaatgaatttgacacaattgtcttgccggtgctttatctcattatatttgtggcaagcatcttgctgaatggtttagcagtgtggatctcttccacattaggaataaaaccagcttcatattctatctcaaaaacatagtggttgcagacctcataatgacgctgacatttccatttcgaatagtccatgatgcaggatttggaccttggtacttcaagtttattccctgcagatacacctcagttttgttttatgcaaacatgtatacttccatcgtg

SEQ ID NO: 165 - DNA, 185 bp, Homo sapiens
agcttttttttttcataataaaatgcattctttattgagtgcatggtggcccaggtgctattccatgtatgtcataggtgtgaaactttaaatctttccaacagccactgccttatggagactgtatcatccttatcttcatcttacaggtgagaaatctgcagtgaagaaaggtacatcccaag

SEQ ID NO: 166 - DNA, 6817 bp, Homo sapiens
cagctccgaggggagtcggaccggagcaaacagccacccccggcttcgtcccccacgaagaggaagggcaggagccgtgccctcgaggccgtgcccgccccgcccgccagcggcccccgggctcccgccaaggagtccccacccaagagggtgcccgatcccagcccagtcaccaagggcactgcggccgagagcggggaggaggcggcgcgggccatcccccgcgagctcccggtcaagagcagctcgctgctgccggagatcaagcccgagcacaagaggggcccgctccccaaccacttcaacggccgggcagagggaggtcgaagcagagagctgggcagagcggccggagcgcctggagcttctgacgccgacggcttgaagcccaggaaccatttcggcgtgggcaggtcgacagtgaccactaaagtgaccctccctgccaagcccaaacatgtggaactaaatcttaaaacccctaagaatcttgacagtttgggaaatgagcacaatccatttagccagccagttcacaaaggcaacactgccaccaaaatctccttatttgaaaacaaacggacaaacagtagcccaagacacactgacattcgaggcccaaggaatactcctgcctctagtaaaacgtttgttgggagggcaaagctgaatttagccaaaaaagccaaagaaatggagcaacctgaaaagaaagtaatgccaaacagtccccagaatggtgtgctggttaaggaaactgctatagaaaccaaagttaccgtctcggaagaagagattctgccagcaaccagaggaatgaatggagactcttctgagaatcaagctcttggtcctcagcctaaccaagatgataaagcagatgtacaaacagatgctggctgcctttcagaaccagtggcttctgctctgattcctgtcaaggatcataagctcttagagaaggaggactcagaggctgcagacagcaaaagccttgtacttgaaaatgtaaccgatacagcacaagacatccccaccactgtggataccaaagatttacctccaacggccatgccaaagccacagcatacattttctgactcacagtcccctgctgagtcatctcctgggccttctctttcactgtctgcacccgctcctggggatgttcccaaagacacatgtgttcaatcacccataagcagtttcccatgcactgatctaaaagtgtcagaaaaccataaaggatgtgttttgcctgtgtctcgtcagaacaatgagaaaatgccacttttagaacttggaggagaaacaacccctcctttgtccacagagcgtagtccagaagctgtgggaagtgagtgtccatccagagtcctcgtccaggtcaggtccttcgtgctccccgtggagagcacccaggatgtgagctcccaggtcatcccagagagctctgaagttagagaagtgcagttgccaacttgtcacagtaatgaacctgaagtggtttccgttgcaagttgtgctcccccacaagaggaagtactgggcaatgaacactctcattgcacagcagagctcgcggcaaaatctggcccacaagtcataccgccagcatcagagaaaactctgcctattcaggctcaaagtcagggcagcagaacacccctgatggctgaatccagtcccaccaactctcccagcagcggaaatcacttagccactcctcaaaggccagatcagactgttacaaatggccaggatagccctgccagccttttgaacatttctgctggtagtgatgatagtgtatttgattcttcttctgatatggaaaaattcactgaaattataaaacagatggatagcgcagtttgtatgcccatgaaaagaaagaaggccaggatgccaaactctcctgctcctcactttgccatgcctcctattcacgaagaccatttagaaaaggtgtttgatcccaaagtgtttacctttggtttggggaagaagaaggaaagtcagccagaaatgtcaccggctttacatttgatgcagaaccttgacacaaaatccaaactgagacccaaacgtgcatctgctgaacagagcgtcctcttcaagtccctgcacaccaacactaatgggaacagtgagcctctggtgatgccggaaatcaatgacaaagagaacagggacgtcacaaatggtggcattaagagatcgagactagaaaaaagtgcacttttctcaagcttgttatcttctttaccacaagacaaaatcttttctccttctgtgacatcagtcaacactatgaccacggctttcagtacttctcagaacggttccctatctcagtcttcagtgtcacagcccacgactgagggtgccccgccctgtggtttgaacaaagaacagtcaaatcttctgcccgacaactccttaaaggtcttcaatttcaactcgtcaagtacatcacactccagtttgaaaagtccaagccacatggaaaaatacccgcaaaaagagaaaaccaaagaagatctggattcacgaagcaacctacacttgccagaaactaaattttctgaattgtcaaaactgaagaatgatgatatggaaaaggctaatcatattgaaagtgttattaaatcaaacttgccaaactgtgcaaacagtgacaccgacttcatgggtcttttcaaatcaagccggtatgacccaagcatttctttttctggaatgtcattatcagacacaatgacacttagaggaagtgtccaaaataaactcaatccccgacctggaaaggtagtgatatatagtgaacccgacgtctctgagaagtgcattgaagttttcagtgacattcaggattgcagttcttggagcctctctccagtgatactcataaaagttgttagaggatgttggattttgtatgagcaaccaaattttgaagggcactccatccccttagaagaaggagaattggaactctctggtctctggggtatagaagacattttggaaaggcacgaagaagcagagtctgataagccagtggtgattggttccatcagacatgtggttcaggattacagagttagtcacattgacttatttactgaaccagaagggttaggaatcctaagttcctactttgatgatactgaagaaatgcagggatttggtgtaatgcagaagacttgttccatgaaagtacattggggcacgtggctgatttatgaagaacctggatttcagggtgttcctttcatcctggaacctggtgaataccctgacttgtccttctgggatacagaagcagcgtacattggatccatgcggcctctgaaaatgggtggccgtaaagttgaattccctacagatccaaaggtagttgtttatgaaaagcctttctttgaaggaaaatgtgtggaactagaaacaggaatgtgtagttttgtcatggagggaggtgaaacagaagaggcgactggagacgatcatttgccgtttacgtcagtggggtctatgaaagttctaagaggcatttgggttgcatatgagaagcctggatttaccggtcatcagtatttgctagaagaaggagaatacagggactggaaagcctggggaggttacaatggagagcttcagtctttacgacctatattaggtgatttttcaaatgctcacatgataatgtacagtgaaaaaaactttggatccaaaggttccagtattgatgtattgggaattgttgctaatttaaaggagactggatatggagtgaagacacagtctattaatgtactgagtggagtatgggtagcctatgaaaatcctgacttcacaggagaacagtatatactggataaaggattttataccagttttgaggactggggaggcaaaaattataagatctcttctgttcaacctatatgtttggattctttcactggcccaaggagacgaaatcagattcacttgttttcagaaccacagtttcaaggtcacagtcaaagttttgaagaaacaacaagtcaaattgatgattcattttctaccaagtcttgcagagtttcaggaggcagctgggttgtatatgatggagaaaatttcactggtaatcaatacgtgttggaagaaggccattatccttgtctgtctgcaatgggatgcccgcctggagcaactttcaagtctcttcgttttatagatgttgaattttctgaaccaacaattattctctttgaaagagaagacttcaaaggaaaaaagattgaacttaatgcagaaactgtcaatctccgatccctgggattcaacacacaaatacgctctgttcaggttattggtggcatatgggttacttatgaatatggcagttacagagggcgacagttcctattgtcacctgcagaagtacctaattggtatgaattcagtggctgtcgccaaataggttctctacgaccttttgttcagaagcgaatttatttcagacttcgaaacaaagcaacagggttattcatgtcaaccaatggaaacttagaggatctgaagcttctgaggatacaggtcatggaggatgtcggggccgatgatcagatttggatctatcaagaaggatgtatcaaatgcaggatagcagaagactgctgcctgacgattgtgggcagcctggtaacatctggctccaagctaggcctggccctggaccagaatgctgacagccagttctggagcttgaagtccgatggcaggatttacagcaagttgaagccaaatttagttttagacattaaagggggcacacagtatgatcaaaatcacattatcctcaacactgtcagcaaagagaagtttacacaagtgtgggaagccatggtcctatatacctgaacaaagaaggaagaagaatcttctggaggtccttccagccaccttatttcttaaaaaggacaatgctgatggaagaccagactggaaagtggatcgactcctccttcattgattctaaattcaaccttaaatcatgctgccatgactcagagaacttactcatcgtttcaaaagactatcatagctttaaaccaataatttgtcctcctttcatttcttgcctttcatttttggtagctgcttaaacaggttgcctaattagcagcttttgggtgattttgtaaaatgttatatcaagatttcaagactgtgtacattttaaattatttccaaagatagtgacaggagagaactggaacaaatttaccaactttgtggacctacaaagcccttacactttaaagggtaagacaaaggcttaagtttgaaaggtagagaactgtttagcatctgagaagaaatactttattaggcctgtaattttggttcttggccttaaacactttctggaacctttaaatatgctgcatagcacaatgggaaagccttaggtattcacacatttaaggaactctaaacaaaatactattttcctttagttcatattaaaaattaatacattttaaaaatttaatgtcaaagtctggtaacatttgttagtaggatttgagttattattttttgagacaggatctcaggctggagtgcagtggcacaatcacggctcactgcagcctctacctccccaggctcaggtgatcctcccacctcagcctcccaagtagctgggactataggcacacatcaccaagcccagccaaattttgttttttttttgtagagatggggtttcatcacgttgcccaggctgatctcgaacctctgggctcaagcaattcactcgcctcggcctcccaaaatgctgggattacaggcctgagccactgcgcccagccaggatttgaattattttaactcatccatgggctgccctagaatgtcacaaatgagggttgtttaatgcctttcttatagctgctactggaacactattatgacctaatttatgagccatccttactcatctacaagtgctgaagcaatgttacatacttttttgctaaactcagattttttagcctaatttcttgtcctcctatccacctgcatccacacatggcctgcatggggctgccttccctgcagtgttctgcagccatgcttcagggtatagctgttggtggacagcctcaggtcttgggggcactatagccactaaacgaggtgtgaaaggctcaagaggatgaccagcaattaattatccccagaaagtgaaggaaaagagacctttagggatgttgctggtcaagtcttgatttgaccggagtcaaatcaatcttcaagcaatcttggaatcctcaactgcagtaagcatttcaaaatgcaaacaaactgcttaacaactgacaagacaccagcccatatgctgctcttccaacagtgggttctagctttgaacaaaagtgctaaacatttccttgaatatattcttcctctttttgtcctcatcactcaatactggtgctcttgtcacaggtagaacagcttgtttcttttccatctattcaagtgtgtttctaattctaaaatgctgatcttctctggagtctatggtaggcaattatggtcactggaatagtttgtcttgttttaaaatattattggtgcatgtacaacagcatccaacatatctgtcttgttcctagatatatagctctgattttaggccttttgtgcataccattacaatatggtggggtaagacattctacagtagcctgtgctgaactgatctcttaaataaacttgcttctggttaactaaaaaaaaaaaaaaaaaaaaa

SEQ ID NO: 167 - DNA, 1506 bp, Homo sapiens
aggcggacaaagcccgattgttcctgggccctttccccatcgcgcctgggcctgctccccagcccggggcaggggcgggggccagtgtggtgacacacgctgtagctgtctccccggctggctggctcgctctctcctggggacacagaggtcggcaggcagcacacagagggacctacgggcagctgttccttcccccgactcaagaatccccggaggcccggaggcctgcagcaggagcggccatgaagaagctgatggtggtgctgagtctgattgctgcagcctgggcagaggagcagaataagttggtgcatggcggaccctgcgacaagacatctcacccctaccaagctgccctctacacctcgggccacttgctctgtggtggggtccttatccatccactgtgggtcctcacagctgcccactgcaaaaaaccgaatcttcaggtcttcctggggaagcataaccttcggcaaagggagagttcccaggagcagagttctgttgtccgggctgtgatccaccctgactatgatgccgccagccatgaccaggacatcatgctgttgcgcctggcacgcccagccaaactctctgaactcatccagccccttcccctggagagggactgctcagccaacaccaccagctgccacatcctgggctggggcaagacagcagatggtgatttccctgacaccatccagtgtgcatacatccacctggtgtcccgtgaggagtgtgagcatgcctaccctggccagatcacccagaacatgttgtgtgctggggatgagaagtacgggaaggattcctgccagggtgattctgggggtccgctggtatgtggagaccacctccgaggccttgtgtcatggggtaacatcccctgtggatcaaaggagaagccaggagtctacaccaacgtctgcagatacacgaactggatccaaaaaaccattcaggccaagtgaccctgacatgtgacatctacctcccgacctaccaccccactggctggttccagaacgtctctcacctagaccttgcctcccctcctctcctgcccagctctgaccctgatgcttaataaacgcagcgacgtgagggtcctgattctccctggttttaccccagctccatccttgcatcactggggaggacgtgatgagtgaggacttgggtcctcggtcttacccccaccactaagagaatacaggaaaatcccttctaggcatctcctctccccaacccttccacacgtttgatttcttcctgcagaggcccagccacgtgtctggaatcccagctccgctgcttactgtcggtgtccccttgggatgtacctttcttcactgcagatttctcacctgtaagatgaagataaggatgatacagtctccatcaggcagtggctgttggaaagatttaagatttcacacctatgacatacatgggatagcacctgggccgccatgcactcaataaagaatgtatttt

SEQ ID NO: 168 - DNA, 1665 bp, Homo sapiens
gaaggaactggttctgctcacacttgctggcttgcgcatcaggactggctttatctcctgactcacggtgcaaaggtgcactctgcgaacgttaagtccgtccccagcgcttggaatcctacggcccccacagccggatcccctcagccttccaggtcctcaactcccgtggacgctgaacaatggcctccatggggctacaggtaatgggcatcgcgctggccgtcctgggctggctggccgtcatgctgtgctgcgcgctgcccatgtggcgcgtgacggccttcatcggcagcaacattgtcacctcgcagaccatctgggagggcctatggatgaactgcgtggtgcagagcaccggccagatgcagtgcaaggtgtacgactcgctgctggcactgccgcaggacctgcaggcggcccgcgccctcgtcatcatcagcatcatcgtggctgctctgggcgtgctgctgtccgtggtggggggcaagtgtaccaactgcctggaggatgaaagcgccaaggccaagaccatgatcgtggcgggcgtggtgttcctgttggccggccttatggtgatagtgccggtgtcctggacggcccacaacatcatccaagacttctacaatccgctggtggcctccgggcagaagcgggagatgggtgcctcgctctacgtcggctgggccgcctccggcctgctgctccttggcggggggctgctttgctgcaactgtccaccccgcacagacaagccttactccgccaagtattctgctgcccgctctgctgctgccagcaactacgtgtaaggtgccacggctccactctgttcctctctgctttgttcttccctggactgagctcagcgcaggctgtgaccccaggagggccctgccacgggccactggctgctggggactggggactgggcagagactgagccaggcaggaaggcagcagccttcagcctctctggcccactcggacaacttcccaaggccgcctcctgctagcaagaacagagtccaccctcctctggatattggggagggacggaagtgacagggtgtggtggtggagtggggagctggcttctgctggccaggatagcttaaccctgactttgggatctgcctgcatcggcgttggccactgtccccatttacattttccccactctgtctgcctgcatctcctctgttccgggtaggccttgatatcacctctgggactgtgccttgctcaccgaaacccgcgcccaggagtatggctgaggccttgcccacccacctgcctgggaagtgcagagtggatggacgggtttagaggggaggggcgaaggtgctgtaaacaggtttgggcagtggtgggggagggggccagagaggcggctcaggttgcccagctctgtggcctcaggactctctgcctcacccgcttcagcccagggcccctggagactgatcccctctgagtcctctgccccttccaaggacactaatgagcctgggagggtggcagggaggaggggacagcttcacccttggaagtcctggggtttttcctcttccttctttgtggtttctgttttgtaatttaagaagagctattcatcactgtaattattattattttctacaataaatgggacctgtgcacagg

SEQ ID NO: 169 - DNA, 277 bp, Homo sapiens
ctctgccacctggtctgccacagatccatgatgtgcagttctctggagcaggcgctggctgtgctggtcactaccttccacaagtactcctgccaagagggcgacaagttcaagctgagtaagggggaaatgaaggaacttctgcacaaggagctgcccagctttgtgggggagaaagtggatgaggaggggtgaagaagctgatgggcagcctggatgagaacacggacaagcaggtggacttccaggagtatgctgttttcctgggaactcatca

SEQ ID NO: 170 - DNA, 2402 bp, Homo sapiens
  modified_base (2138): a, t, c, g, other or unknown
ggagaggtgcgggccgaatccgagccgagcgagaggaatccggcagtagagagcggactccagccggcggaccctgcagccctcgcctgggacagcggcgcgctgggcaggcgcccaagagagcatcgagcagcggaacccgcgaagccggcccgcagccgcgacccgcgcagcctgccgctctcccgccgccggtccgggcagcatgaggcgcgcggcgctctggctctggctgtgcgcgctggcgctgagcctgcagctggccctgccgcaaattgtggctactaatttgccccctgaagatcaagatggctctggggatgactctgacaacttctccggctcaggtgcaggtgctttgcaagatatcaccttgtcacagcagaccccctccacttggaaggacacgcagctcctgacggctattcccacgtctccagaacccaccggcctggaggctacagctgcctccacctccaccctgccggctggagaggggcccaaggagggagaggctgtagtcctgccagaagtggagcctggcctcaccgcccgggagcaggaggccaccccccgacccagggagaccacacagctcccgaccactcatcaggcctcaacgaccacagccaccacggcccaggagcccgccacctcccacccccacagggacatgcagcctggccaccatgagacctcaacccctgcaggacccagccaagctgaccttcacactccccacacagaggatggaggtccttctgccaccgagagggctgctgaggatggagcctccagtcagctcccagcagcagagggctctggggagcaggacttcacctttgaaacctcgggggagaatacggctgtagtggccgtggagcctgaccgccggaaccagtccccagtggatcagggggccacgggggcctcacagggcctcctggacaggaaagaggtgctgggaggggtcattgccggaggcctcgtggggctcatctttgctgtgtgcctggtgggtttcatgctgtaccgcatgaagaagaaggacgaaggcagctactccttggaggagccgaaacaagccaacggcggggcctaccagaagcccaccaaacaggaggaattctatgcctgacgcgggagccatgcgccccctccgccctgccactcactaggcccccacttgcctcttccttgaagaactgcaggccctggcctcccctgccaccaggccacctccccagcattccagcccctctggtcgctcctgcccacggagtcgtgggtgtgctgggagctccactctgcttctctgacttctgcctggagacttagggcaccaggggtttctcgcataggacctttccaccacagccagcacctggcatcgcaccattctgactcggtttctccaaactgaagcagcctctccccaggtccagctctggaggggagggggatccgactgctttggacctaaatggcctcatgtggctggaagatctgcgggtggggcttggggctcacacacctgtagcacttactggtaggaccaagcatcttgggggggtggccgctgagtggcagggacaggagtcactttgtttcgtggggaggtctaatctagatatcgacttgtttttgcacatgtttcctctagttctttgttcatagcccagtagaccttgttacttctgaggtaagttaagtaagttgattcggtatccccccatcttgcttccctaatctatggtcgggagacagcatcagggttaagaagactttttttttttttttttaaactaggagaaccaaatctggaagccaaaatgtaggcttagtttgtgtgttgtctcttgagtttgtcgctcatgtgtgcaacagggtatggactatctgtctggtggccccgtttctggtggtctgttggcaggctggccagtccaggctgccgtggggccgccgcctctttcaagcagtcgtgcctgtgtccatgcgctcagggccatgctgaggcctgggccgctgccacgttggagaagcccgtgtgagaagtgaatgctgggactcagccttcagacagagaggactgtagggagggcggcaggggcctggagatcctcctgcagaccacncccgtcctgcctgtgcgccgtctccaggggctgcttcctcctggaaattgacgaggggtgtcttgggcagagctggctctgagcgcctccatccaaggccaggttctccgttagctcctgtggccccaccctgggccctgggctggaatcaggaatattttccaaagagtgatagtcttttgcttttggcaaaactctacttaatccaatgggtttttccctgtacagtagattttccaaatgtaataaactttaatataaagt

SEQ ID NO: 171 - DNA, 775 bp, Homo sapiens
gaattcccgggcagcagacagtggtcagtcctttcttggctctgctgacactcgagcccacattccgtcacctgctcagaatcatgcaggtctccactgctgcccttgctgtcctcctctgcaccatggctctctgcaaccagttctctgcatcacttgctgctgacacgccgaccgcctgctgcttcagctacacctcccggcagattccacagaatttcatagctgactactttgagacgagcagccagtgctccaagcccggtgtcatcttcctaaccaagcgaagccggcaggtctgtgctgaccccagtgaggagtgggtccagaaatatgtcagcgacctggagctgagtgcctgaggggtccagaagcttcgaggcccagcgacctcggtgggcccagtggggaggagcaggagcctgagccttgggaacatgcgtgtgacctccacagctacctcttctatggactggttgttgccaaacagccacactgtgggactcttcttaacttaaattttaatttatttatactatttagtttttgtaatttattttcgatttcacagtgtgtttgtgattgtttgctctgagagttcccctgtcccctcccccttccctcacaccgcgtctggtgacaaccgagtggctgtcatcagcctgtgtaggcagtcatggcaccaaagccaccagactgacaaatgtgtatcggatgcttttgttcagggctgtgatcggcctggggaaataataaagatgctcttttaaaaggt

SEQ ID NO: 172 - DNA, 1230 bp, Homo sapiens
agacgttcgcacacctgggtgccagcgccccagaggtcccgggacagcccgaggcgccgcgcccgccgccccgagctccccaagccttcgagagcggcgcacactcccggtctccactcgctcttccaacacccgctcgttttgcggcagctcgtgtcccagagaccgagttgccccagagaccgagacgccgccgctgcgaaggaccaatgagagccccgctgctaccgccggcgccggtggtgctgtcgctcttgatactcggctcaggccattatgctgctggattggacctcaatgacacctactctgggaagcgtgaaccattttctggggaccacagtgctgatggatttgaggttacctcaagaagtgagatgtcttcagggagtgagatttcccctgtgagtgaaatgccttctagtagtgaaccgtcctcgggagccgactatgactactcagaagagtatgataacgaaccacaaatacctggctatattgtcgatgattcagtcagagttgaacaggtagttaagcccccccaaaacaagacggaaagtgaaaatacttcagataaacccaaaagaaagaaaaagggaggcaaaaatggaaaaaatagaagaaacagaaagaagaaaaatccatgtaatgcagaatttcaaaatttctgcattcacggagaatgcaaatatatagagcacctggaagcagtaacatgcaaatgtcagcaagaatatttcggtgaacggtgtggggaaaagtccatgaaaactcacagcatgattgacagtagtttatcaaaaattgcattagcagccatagctgcctttatgtctgctgtgatcctcacagctgttgctgttattacagtccagcttagaagacaatacgtcaggaaatatgaaggagaagctgaggaacgaaagaaacttcgacaagagaatggaaatgtacatgctatagcataactgaagataaaattacaggatatcacattggagtcactgccaagtcatagccataaatgatgagtcggtcctctttccagtggatcataagacaatggaccctttttgttatgatggttttaaactttcaattgtcactttttatgctatttctgtatataaaggtgcacgaaggtaaaaagtattttttcaagttgtaaataatttatttaatatttaatggaagtgtatttattttacagctcattaaacttttttaacc

SEQ ID NO: 173 - DNA, 271 bp, Homo sapiens
  modified_base (241): a, t, c, g, other or unknown
aagatttgcattcacctggcccaaaccctttttgtctctttgggtgaccggaaaactccacctcaagttttcttttgtggggctgccccccaagtgtcgtttgttttactgtagggtctccccgcccggcgcccccagtgttttctgagggcggaaatggccaattcgggcctgcagttgctgggcttctccatggccctgctgggctgggtgggtctggtggcctgcaccgccatcccgnagtggcagatgagctcctatgcgggtgaca

SEQ ID NO: 174 - DNA, 243 bp, Homo sapiens
ctgctggctcacctccgagccacctctgctgcgcaccgcacctcggacctacagcccaggatactttgggacttgccggcgctcagaaacgcgcccagacggcccctccaccttttgtttgcctagggcgccgagagcgcccggagggaaccgcctggccttcggggaccaccaattttgtctggaaccaccctcccggcgtatcctactccctgtgccgcgagccatcgcttcactggaggg

SEQ ID NO: 175 - DNA, 440 bp, Homo sapiens
  modified_base (50): a, t, c, g, other or unknown
  modified_base (55): a, t, c, g, other or unknown
  modified_base (92): a, t, c, g, other or unknown
  modified_base (250): a, t, c, g, other or unknown
  modified_base (254): a, t, c, g, other or unknown
  modified_base (361): a, t, c, g, other or unknown
  modified_base (369): a, t, c, g, other or unknown
  modified_base (401): a, t, c, g, other or unknown
  modified_base (407): a, t, c, g, other or unknown
  modified_base (416): a, t, c, g, other or unknown
  modified_base (421): a, t, c, g, other or unknown
actataacttagtgtctgtatttaatattgacaaccaaaaatatatatanttttnttgcatctatacacaacagggcaggagtctccatgtnttcttgagcagtgagtttgcaggctcccacaggccctcttctcatggtaatagtgtggccctagtgcaaaggagactagaacccggcagcccagactggcccttcccctctcctccctgcactccagtgcttcccaactggtctcaggtaaagaaagnttantttgagtggttgggtaggaagagatgggaaggggcaaatcctaatgggagcctgacccctagagtggggagttccagggccagcagaacgggtgggccatagccctncctggggntagaagctttgtagttcatagttcgattagtntgtccntagggcatnaggtnccagccctacagattagct

SEQ ID NO: 176 - DNA, 462 bp, Homo sapiens
catccattcatcgattcgcgcattctccagacctttacagcctgtgctgggtactggagactccctgggtgggggccctgagggcccgtgcttctgccccaccccctgcaacctgacacgctatgggaaagagatctccatggtcaggatccccaacaggggctcagcccggtacctggcgaggaagtacaaccgcaacgagacctacatacgggagaacttcctggtcctagatgtcttctttgaggccctgacctctgaagccatggagcagcgagcagcctatggcctgtcagccctgctgggagacctcgggggacagatgggcctgttcattggggccagcatcctcacgttgctggagatcctcgactacatctatgaggtgtcctgggatcgactgaagcgggtatggaggcgtcccaagaccccccctggggacctccactgggggcatctcca

SEQ ID NO: 177 - DNA, 499 bp, Homo sapiens
  modified_base (498)..(499): a, t, c, g, other or unknown
aggagagcatgatcaaggagtgtggctgtctacatcttctatccgcggccccagaacgtggagtactgtgactacagaaagcacagttcctgggggtactgctactataagctccaggttgacttctcctcagaccacctgggctgtttcaccaagtgccggaagccatgcagcgtgaccagctaccagctctctgctggttactcacgatggccctcggtgacatcccaggaatgggtcttccagatgctatcgcgacagaacaattacaccgtcaacaacaagagaaatggagtggccaaagtcaacatcttcttcaaggagctgaactacaaaaccaattctgagtctccctctgtcacgatggtcaccctcctgtccaacctgggcagccagtggagcctgtggttcggctcctcggtgttgtctgtggtggagatggctgagctcgtctttgacctgctggtcatcatgttcctcatgctgctcgaagttctnn

SEQ ID NO: 178 - DNA, 402 bp, Homo sapiens
gtgccagcccccgactggcctggccacactgctctccagtagcacagatgtctgctcctcctcttgaacttgggtgggaaaccccacccaaaagccccctttgttacttaggcaattccccttccctgactcccgagggctagggctagagcagacccgggtaagtaaaggcagacccagggctcctctagcctcatacccgtgccctcacagagccatgccccgtcacctctgccctgtgtctttcatacctctacatgtctgcttgagatatttcctcagcctgaaagtttccccaaccatctgccagagaactcctatgcatcccttagaaccctgctcagacaccattacttttgtgaacgcttctgccacatcttgtcttccccaaaattgatcact

SEQ ID NO: 179 - DNA, 555 bp, Homo sapiens
acactgaagtccaccctgggagctggtaaaacaatttcagtctcagacccgtctgttttccagggtcctccgagcctgggcttcctcaagagcgtggcccaagggccccacagcccagatccggcagccccaccaccttcactgaggaggccccgaagctccgttcccgctgctccttagagacaggggaggcagatatgcacaaacgcgcctcggcccagcttggggctggcgggggaggctgtgtcttcaaacctttgcccccagttgggtcagtagaaccaccagtgtcctccccttctacctcccagctccactttggaggctgaggaagcgagaggttttctaggcagatttggagccctggagattgagttcacagtgtatgttctgggggcgctggtgcagtcagcggtccagtctccagcctgcaggcgtgcacactggggtggacgatgggtggccccgcagtgtacacatttgggtgggccccggcccctataccccagtgttctctttgatccagtcccgaaacagaagggagcttgtgtacac

SEQ ID NO: 180 - DNA, 213 bp, Homo sapiens
cagatctggatggagttgtgacctttgacttgtttaagtggttgcagctgaccatgtttgcatgaggcagggactcggtcccccttgccgtgctcccctccctcctcgtctgccaagcctcgcctcctaccacaccacaccaggccaccccagctgcaagtgccttccttggagcagagaggcagcctcgtcctcctgtcccctctcctccca

SEQ ID NO: 181 - DNA, 2305 bp, Homo sapiens
gaattcatgccgcgtttctgtgttggacaggggtgactttgtgccggatggcttctgtgtgagagcgcgcgcgagtgtgcatgtcggtgagctgggagggtgtgtctcagtgtctatggctgtggttcggtataagtctaagcatgtctgccagggtgtatttgtgcctgtatgtgcgtgcctcggtgggcactctcgtttccttccgaatgtggggcagtgccggtgtgctgccctctgccttgagacctcaagccgcgcaggcgcccagggcaggcaggtagcggccacagaagagccaaaagctcccgggttggctggtaagcacaccacctccagctttagccctctggggccagccagggtagccgggaagcagtggtggcccgccctccagggagcagttgggccccgcccgggccagcctcaggagaaggagggcgaggggaggggagggaaaggggaggagtgcctcgccccttcgcggctgccggcgtgccattggccgaaagttcccgtacgtcacggcgagggcagttcccctaaagtcctgtgcacataacgggcagaacgcactgcgaagcggcttcttcagagcacgggctggaactggcaggcaccgcgagcccctagcacccgacaagctgagtgtgcaggacgagtccccaccacacccacaccacagccgctgaatgaggcttccaggcgtccgctcgcggcccgcagagccccgccgtgggtccgcctgctgaggcgcccccagccagtgcgcttacctgccagactgcgcgccatggggcaacccgggaacggcagcgccttcttgctggcacccaatagaagccatgcgccggaccacgacgtcacgcagcaaagggacgaggtgtgggtggtgggcatgggcatcgtcatgtctctcatcgtcctggccatcgtgtttggcaatgtgctggtcatcacagccattgccaagttcgagcgtctgcagacggtcaccaactacttcatcacttcactggcctgtgctgatctggtcatgggcctggcagtggtgccctttggggccgcccatattcttatgaaaatgtggacttttggcaacttctggtgcgagttttggacttccattgatgtgctgtgcgtcacggccagcattgagaccctgtgcgtgatcgcagtggatcgctactttgccattacttcacctttcaagtaccagagcctgctgaccaagaataaggcccgggtgatcattctgatggtgtggattgtgtcaggccttacctccttcttgcccattcagatgcactggtaccgggccacccaccaggaagccatcaactgctatgccaatgagacctgctgtgacttcttcacgaaccaagcctatgccattgcctcttccatcgtgtccttctacgttcccctggtgatcatggtcttcgtctactccagggtctttcaggaggccaaaaggcagctccagaagattgacaaatctgagggccgcttccatgtccagaaccttagccaggtggagcaggatgggcggacggggcatggactccgcagatcttccaagttctgcttgaaggagcacaaagccctcaagacgttaggcatcatcatgggcactttcaccctctgctggctgcccttcttcatcgttaacattgtgcatgtgatccaggataacctcatccgtaaggaagtttacatcctcctaaattggataggctatgtcaattctggtttcaatccccttatctactgccggagcccagatttcaggattgccttccaggagcttctgtgcctgcgcaggtcttctttgaaggcctatgggaatggctactccagcaacggcaacacaggggagcagagtggatatcacgtggaacaggagaaagaaaataaactgctgtgtgaagacctcccaggcacggaagactttgtgggccatcaaggtactgtgcctagcgataacattgattcacaagggaggaattgtagtacaaatgactcactgctgtaaagcagtttttctacttttaaagacccccccccccaacagaacactaaacagactatttaacttgagggtaataaacttagaataaaattgtaaaattgtatagagatatgcagaaggaagggcatccttctgccttttttatttttttaagctgtaaaaagagagaaaacttatttgagtgattatttgttatttgtacagttcagttcctctttgcatggaatttgtaagtttatgtctaaagagctttagtcctagaggacctgagtc

SEQ ID NO: 182 - DNA, 420 bp, Homo sapiens
gtgatctgcatgtggcagggctgcgcagtggagcggccagtgggcaggatgacgagccagacccctctgccccagtccccccggcccaggcggccaacgatgtctactgttgtggagctgaacgtcgggggtgagttccacaccaccaccctgggtaccctgaggaagtttccgggctcaaagctggcagagatgttctctagcttagccaaggcctccacggacgcggagggccgcttcttcatcgaccgccccagcacctatttcagacccatcctggactacctgcgcactgggcaagtgccacacagcacatccctgaagtgtaccgtgaggctcagttctacgaaatcaagcctttggtcaagctgctggaggacatgccacagatctttggtgagcaggtgtctcggaagcagt

SEQ ID NO: 183 - DNA, 244 bp, Homo sapiens
caacttcacagaagctctcgctgagacagcctgtaggcagatgggctacagcagcaaacccactttcagagctgtggagattggcccagaccaggatctggatgttgttgaaatcacagaaaacagccaggagcttcgcatgcggaactcaagtgggccctgtctctcaggctccctggtctccctgcactgtcttgcctgtgggaagagcctgaagacccggggtgtggtgggtggggaggag

SEQ ID NO: 184 - DNA, 2834 bp, Homo sapiens
gcccactcccaccgccagctggaaccctggggactacgacgtccctcaaaccttgcttctaggagataaaaagaacatccagtcatggataaaaatgagctggttcagaaggccaaactggccgagcaggctgagcgatatgatgacatggcagcctgcatgaagtctgtaactgagcaaggagctgaattatccaatgaggagaggaatcttctctcagttgcttataaaaatgttgtaggagcccgtaggtcatcttggagggtcgtctcaagtattgaacaaaagacggaaggtgctgagaaaaaacagcagatggctcgagaatacagagagaaaattgagacggagctaagagatatctgcaatgatgtactgtctcttttggaaaagttcttgatccccaatgcttcacaagcagagagcaaagtcttctatttgaaaatgaaaggagattactaccgttacttggctgaggttgccgctggtgatgacaagaaagggattgtcgatcagtcacaacaagcataccaagaagcttttgaaatcagcaaaaaggaaatgcaaccaacacatcctatcagactgggtctggcccttaacttctctgtgttctattatgagattctgaactccccagagaaagcctgctctcttgcaaagacagcttttgatgaagccattgctgaacttgatacattaagtgaagagtcatacaaagacagcacgctaataatgcaattactgagagacaacttgacattgtggacatcggatacccaaggagacgaagctgaagcaggagaaggaggggaaaattaaccggccttccaacttttgtctgcctcattctaaaatttacacagtagaccatttgtcatccatgctgtcccacaaatagttttttgtttacgatttatgacaggtttatgttacttctatttgaatttctatatttcccatgtggtttttatgtttaatattaggggagtagagccagttaacatttagggagttatctgttttcatcttgaggtggccaatatggggatgtggaatttttatacaagttataagtgtttggcatagtacttttggtacattgtggcttcaaaagggccagtgtaaaactgcttccatgtctaagcaaagaaaactgcctacatactggtttgtcctggcggggaataaaagggatcattggttccagtcacaggtgtagtaattgtgggtactttaaggtttggagcacttacaaggctgtggtagaatcataccccatggataccacatattaaaccatgtatatctgtggaatactcaatgtgtacacctttgactacagctgcagaagtgttcctttagacaaagttgtgacccattttactctggataagggcagaaacggttcacattccattatttgtaaagttacctgctgttagctttcattatttttgctacactcattttatttgtatttaaatgttttaggcaacctaagaacaaatgtaaaagtaaagatgcaggaaaaatgaattgcttggtattcattacttcatgtatatcaagcacagcagtaaaacaaaaacccatgtatttaacttttttttaggatttttgcttttgtgattttttttttttttttttgatacttgcctaacatgcatgtgctgtaaaaatagttaacagggaaataacttgagatgatggctagctttgtttaatgtcttatgaaattttcatgaacaatccaagcataattgttaagaacacgtgtattaaattcatgtaagtggaataaaagttttatgaatggacttttcaactactttctctacagcttttcatgtaaattagtcttggttctgaaacttctctaaaggaaattgtacattctttgaaatttattccttattccctcttggcagctaatgggctcttaccaagtttaaacacaaaatttatcataacaaaaatactactaatataactactgtttccatgtcccatgatcccctctcttcctccccaccctgaaaaaaatgagttcctattttttctgggagagggggggattgattagaaaaaaatgtagtgtgttccatttaaaattttggcatatggcattttctaacttaggaagccacaatgttcttggcccatcatgacattgggtagcattaactgtaagttttgtgcttccaaatcactttttggtttttaagaatttcttgatactcttatagcctgccttcaattttgatcctttattctttctatttgtcaggtgcacaagattaccttcctgttttagccttctgtcttgtcaccaaccattcttacttggtggccatgtacttggaaaaaggccgcatgatctttctggctccactcagtgtctaaggcaccctgcttcctttgcttgcatcccacagactatttccctcatcctatttactgcagcaaatctctccttagttgatgagactgtgtttatctccctttaaaaccctacctatcctgaatggtctgtcattgtctgcctttaaaatccttcctctttcttcctcctctattctctaaataatgatggggctaagttatacccaaagctcactttacaaaatatttcctcagtactttgcagaaaacaccaaacaaaaatgccattttaaaaaaggtgtattttttcttttagaatgtaagctcctcaagagcagggacaatgttttctgtatgttctattgtgcctagtacactgtaaatgctcaataaatattgatgatgggaggcagtgagtcttgatgataagggtgagaaactgaaatccc

SEQ ID NO: 185 - DNA, 95 bp, Homo sapiens
gtgacctttgacttgtttaagtggttgcagctgaccatgtttgcatgaggcagggactcggtcccccttgccgtgctcccctccctcctcgtctg

SEQ ID NO: 186 - DNA, 3835 bp, Homo sapiens
catgcgtgactgcccccacactcacacagctctcactccccacatgctccatgcctcctgtccccactgaggagagctcctagaggctcgcccgctccccactgacatgcatccctgcagacaaacgaggcgcccagagagcttccccactgcacttgccagggctgcgggcccagccttgcccctagcttcctctggcgggagctatggctcggaggagaatggggacttctgaacatacctgcccgcaagggggaccggaggtgctcggagtgggcttgtgagggaggtggtgccgcagtccccgctgagcagcctggccccccagatcgtgtacttcactgctacattcccctacgtggtcgtggtcgtgctgcttgtgcttggagtgctgctgcctggcgccctggacagcatcatttactatctcaagcctgactggtcaaagctggggtcccctcaggtgaggtggaggtggggaggctgcagcagggtgttgtgggggagccctgcaggcccctcatgcctgcactctccagccctttctctgtaggtatggatagatgtggggacccagattttcttttcttatgccattggcctgggggccctcacagccctgggcagctacaaccgcttcaacaacaactgctacaagtaagcactgctgccctgccacccgtgccctgtcccgccctgccctgcccagcagcctaacccatccactctggcccctccacccctccaggacgccatcatcctggctgtcatcaacagtgggaccagcttctttgctggcttcgtggtcttctccatcctgggcttcatggctgcagagcagggcatgcacatctccaaggtggcagagtcaggtagggccctacccccagccccgcctccagagcagcaactgccacccagatgcatgatgtacaagaacacgcaatagaaatgctgaaaagtgatgaggattcaaacagaacttctcagattgtgggcctgtgggggcaggtcctgggatttttcaatgttgacagagacaggacctcccagcccctgctgcatgacccagggttgacagcacctcagaggcaggcgtgggcatgggcgtgagtgttgcaggcagggctcagggtgcgcgcagggcacgacatcggctgcaaggtctagagcctgcacctttcccacagggccgggcctggccttcatcgcctacccacaggctgtcacactgatgccagtggccccactctgggctgccctgttcttcttcatgctgttgctgcttggtctcgacaaccagtttgcatgggctctgggacagggagccaggagaggggcggagtgagggctgcgggcaaggaaaggggtggagggtggtgcggggctcggcctgagctagcctggccacagtttgtaggtgtggagggcttcatcaccggcctcctcaacctcctcccggcctcctactacttctgtttccaaagggagatctctgtggccctctgttgtgccctccgctttgtcattgatctctccatggtgactgatgtgagtggggtggggggtctgcctgtgacctctggtggccgtctgccatcctccctgactgggctctgtcccccagggtgggatgtatgtcttccagctgtttgactactactcggccagcggcaccaccctgctctggcaggccttttgggagtgcgtggtggtggtctgggtgtatggtaggtcatggctgagggctgggctggggcatggtgacggggaaggcaggtctccagcttggccctcccgcctcgccttgccacaggagctgaccgcttcacggacgacattgcctgtatgatcgggtaccgaccttgcccctggatgaaatggtgctggtccttcttcaccccgctggtttgcatggtaagggctgggggaggtggggcggggtggggggggcggggcggggtgggggccccattaaggacgggcattctggtctgtagggcatcttcatcttcaacgttgtgtactacaagccgctggtctacaacaacacctacgtgtacccgtggtggggtgaggccatgggctgggccttcgtgctgtcctccatgctgtgcatgccactgcacctcctgggctgcctcctcagggccaagggcaccatggctgaggtaaggctccctcccggcctgccctcccctcccctgctatgaacattcaacccagcctgcttcctagccaaggagtggccctgactagggtggcaggcagcaggagctggagagagaggcagaggaagtcaccgtggggatgagcaggtgactctgggggcttcaacatgtcctctcctgcagtgctggaagcacctgacccagcccatctggggcctccaccacttggagtaccgagctcaggatgcagatgtcaggggcctgaccaccctgaccccagtgtccgagagcagcaaggtcgtcgtggtggagagtgtcatgggacagctcagctcacatcaccagctcacctctggtagccatagcagcccctgcttcatccccaccccacccctccagggggcctgcctttccctgacacttttggggtctgcctgggagaggaggggagaaagcaccatgagtgctcactaaaacaactttttccatttttaataaaacgccaaaaatatcacaacccaccaaaaatagatgcctctccccctccagtcctagcccagctggtcctaggccccgcctagtgccccacccccacccacagtgctgcactcctcctgcccctgccacgcccaccccctgcccacctctccaggttctgctctgtagcacacccttgggtgacccctcaccccagaagcagcagtggcagcttgggaaatgtgaggaagggaaggagggagagacgggagggaggagagagaggagaagggaggcaggggaggggcagcagaaccaagacaaatatttcagctgggctatacccctctccccatccctgttatagaagcttagagagccagccagcagtggaaccttctggttcctgcgccaatcaccaccaatatcaattgtgtgagcttgggtgcgagtgcacgcgtgcgtgagcacgtagagtatatatagatctctatctcttagcaaaggtgaataccagatgtaaatggtgcctctgggcaaaggaggcttgtattttgcacattttataacaacttgagagaatgagatttctgcttgtatatttctaaaaagaggaaggagccccaaacccatcctctcctttaccactccccatttcctgtgagccctaccttacccctctgcccctagcctaggagtgtgaatttatagatctaactttcagaggcaaaacaaaagcttcgagctgttgatgtgcagtctgttgtgtggatgtgtgtgtgtggtcccccagacccagaatggattggaaaagtgcatggtggggcctcggggctgtccccacgctgtccctttgcccacaggtctgtggggcaacaggctgcaatattccatcctgggtgtctgggctgctaacctggcctgctcaggcttcccaccctgtgccctgggctgggcacacccccgggaagggaccccggacacggctcccacatccaggctcaaggcggatgcacttcctgcacctccagtcttctgtgtagcggctttaacccacgtatgtctgtcacgtccagtcccgagacggctgagtgaccccaagaaaggcttccctgacacccggacagaggctggagggctggggctgggtgagggtggtgggcctgcggggacattctactgtgcta

SEQ ID NO: 187 - DNA, 396 bp, Homo sapiens
  modified_base (320): a, t, c, g, other or unknown
  modified_base (386): a, t, c, g, other or unknown
ccaaaccatgtcagacatgatatgatcagatttgtgttttgaaaaattaacactgcaatgtggagaattgattggagggaatcagaagagtccagtaagtaggaaaaagtaataacttacactagggtggtagcagtaagaatggaaagaagtagatgcatttgaatgatactcaaaaggtgaaaataactgttcttagtgatgagatagatgtagggataagctgaagcacttaatgtaaagggacggatggtgttgtctttcattaagatagggaagagtaggagattagatttccagagggaagatcatgaggttgnatttaaggacgtctttgagttttaaatgcctctgcccttcttaagtgggagatgtccaagttaagncatttgggat

SEQ ID NO: 188 - DNA, 2393 bp, Homo sapiens
gacgaggaggcggcgccgctgctgcggaggacggcgcggcccggcggggggacgccgctgctgaacggggctgggcccggggctgcgcgccagtcaccacgttctgcgcttttccgagtcggacatatgagcagcgtggagctggatgatgaacttttggacccggatatggaccctccacatcccttccccaaggagatcccacacaacgagaagctcctgtccctcaagtatgagagcttggactatgacaacagtgagaaccagctgttcctggaggaggagcggcggatcaatcacacggccttccggacggtggagatcaagcgctgggtcatctgcgccctcattgggatcctcacgggcctcgtggcctgcttcattgacatcgtggtggaaaacctggctggcctcaagtacagggtcatcaagggcaatatcgacaagttcacagagaagggcggactgtccttctccctgttgctgtgggccacgctgaacgccgccttcgtgctcgtgggctctgtgattgtggctttcatagagccggtggctgctggcagcggaatcccccagatcaagtgcttcctcaacggggtgaagatcccccacgtggtgcggctcaagacgttggtgatcaaagtgtccggtgtgatcctgtccgtggtcgggggcctggccgtgggaaaggaagggccgatgatccactcaggttcagtgattgccgccgggatctctcagggaaggtcaagctcactgaaacgagatttcaagatcttcgagtacctccgcagagacacagagaagcgggacttcgtctccgcaggggctgcggccggagtgtcagcggcgtttggagcccccgtgggtggggtcctgttcagcttggaggagggtgcgtccttctggaaccagttcctgacctggaggatcttctttgcttccatgatctccacgttcaccctgaattttgttctgagcatttaccacgggaacatgtgggacctgtccagcccaggcctcatcaacttcggaaggtttgactcggagaaaatggcctacacgatccacgagatcccggtcttcatcgccatgggcgtggtgggcggtgtgcttggagcagtgttcaatgccttgaactactggctgaccatgtttcgaatcaggtacatccaccggccctgcctgcaggtgattgaggccgtgctggtggccgccgtcacggccacagttgccttcgtgctgatctactcgtcgcgggattgccagcccctgcaggggggctccatgtcctacccgctgcagctcttttgtgcagatggcgagtacaactccatggctgcggccttcttcaacaccccggagaagagcgtggtgagcctcttccacgacccgccaggctcctacaaccccctgaccctcggcctgttcacgctggtctacttcttcctggcctgctggacctacgggctcacggtgtctgccggggtcttcatcccgtccctgctcatcggggctgcctggggccggctctttgggatctccctgtcctacctcacgggggcggcgatctgggcggaccccggcaaatacgccctgatgggagctgctgcccagctgggcgggattgtgcggatgacactgagcctgaccgtcatcatgatggaggccaccagcaacgtgacctacggcttccccatcatgctggtgctcatgaccgccaagatcgtgggcgacgtcttcattgagggcctgtacgacatgcacattcagctgcagagtgtgcccttcctgcactgggaggccccggtcacctcacactcactcactgccagggaggtgatgagcacaccagtgacctgcctgaggcggcgtgagaaggtcggcgtcattgtggacgtgctgagcgacacggcgtccaatcacaacggcttccccgtggtggagcatgccgatgacacccagcctgcccggctccagggcctgatcctgcgctcccagctcatcgttctcctaaagcacaaggtgtttgtggagcggtccaacctgggcctggtacagcggcgcctgaggctgaaggacttccgagacgcctacccgcgcttcccacccatccagtccatccacgtgtcccaggacgagcgggagtgcaccatggacctctccgagttcatgaacccctccccctacacggtgccccaggaggcgtcgctcccacgggtgttcaagctgttccgggccctgggcctgcggcacctggtggtggtggacaaccgcaatcaggttgtcgggttggtgaccaggaaggacctcgccaggtaccgcctgggaaagagaggcttggaggagctctcgctggcccagacgtgaggcccagccctgcccataatggg

SEQ ID NO: 189 - DNA, 2787 bp, Homo sapiens
agagcggaggccgcactccagcactgcgcagggaccgccttggaccgcagttgccggccaggaatcccagtgtcacggtggacacgcctccctcgcgcccttgccgcccacctgctcacccagctcaggggctttggaattctgtggccacactgcgaggagatcggttctgggtcggaggctacaggaagactcccactccctgaaatctggagtgaagaacgccgccatccagccaccattccaaggaggtgcaggagaacagctctgtgataccatttaacttgttgacattacttttatttgaaggaacgtatattagagcttactttgcaaagaaggaagatggttgtttccgaagtggacatcgcaaaagctgatccagctgctgcatcccaccctctattactgaatggagatgctactgtggcccagaaaaatccaggctcggtggctgagaacaacctgtgcagccagtatgaggagaaggtgcgcccctgcatcgacctcattgactccctgcgggctctaggtgtggagcaggacctggccctgccagccatcgccgtcatcggggaccagagctcgggcaagagctccgtgttggaggcactgtcaggagttgcccttcccagaggcagcgggatcgtgaccagatgcccgctggtgctgaaactgaagaaacttgtgaacgaagataagtggagaggcaaggtcagttaccaggactacgagattgagatttcggatgcttcagaggtagaaaaggaaattaataaagcccagaatgccatcgccggggaaggaatgggaatcagtcatgagctaatcaccctggagatcagctcccgagatgtcccggatctgactctaatagaccttcctggcataaccagagtggctgtgggcaatcagcctgctgacattgggtataagatcaagacactcatcaagaagtacatccagaggcaggagacaatcagcctggtggtggtccccagtaatgtggacatcgccaccacagaggctctcagcatggcccaggaggtggaccccgagggagacaggaccatcggaatcttgacgaagcctgatctggtggacaaaggaactgaagacaaggttgtggacgtggtgcggaacctcgtgttccacctgaagaagggttacatgattgtcaagtgccggggccagcaggagatccaggaccagctgagcctgtccgaagccctgcagagagagaagatcttctttgagaaccacccatatttcagggatctgctggaggaaggaaaggccacggttccctgcctggcagaaaaacttaccagcgagctcatcacacatatctgtaaatctctgcccctgttagaaaatcaaatcaaggagactcaccagagaataacagaggagctacaaaagtatggtgtcgacataccggaagacgaaaatgaaaaaatgttcttcctgatagataaaattaatgcctttaatcaggacatcactgctctcatgcaaggagaggaaactgtaggggaggaagacattcggctgtttaccagactccgacacgagttccacaaatggagtacaataattgaaaacaattttcaagaaggccataaaattttgagtagaaaaatccagaaatttgaaaatcagtatcgtggtagagagctgccaggctttgtgaattacaggacatttgagacaatcgtgaaacagcaaatcaaggcactggaagagccggctgtggatatgctacacaccgtgacggatatggtccggcttgctttcacagatgtttcgataaaaaattttgaagagttttttaacctccacagaaccgccaagtccaaaattgaagacattagagcagaacaagagagagaaggtgagaagctgatccgcctccacttccagatggaacagattgtctactgccaggaccaggtatacaggggtgcattgcagaaggtcagagagaaggagctggaagaagaaaagaagaagaaatcctgggattttggggctttccagtccagctcggcaacagactcttccatggaggagatctttcagcacctgatggcctatcaccaggaggccagcaagcgcatctccagccacatccctttgatcatccagttcttcatgctccagacgtacggccagcagcttcagaaggccatgctgcagctcctgcaggacaaggacacctacagctggctcctgaaggagcggagcgacaccagcgacaagcggaagttcctgaaggagcggcttgcacggctgacgcaggctcggcgccggcttgcccagttccccggttaaccacactctgtccagccccgtagacgtgcacgcacactgtctgcccccgttcccgggtagccactggactgacgacttgagtgctcagtagtcagactggatagtccgtctctgcttatccgttagccgtggtgatttagcaggaagctgtgagagcagtttggtttctagcatgaagacagagccccaccctcagatgcacatgagctggcgggattgaaggatgctgtcttcgtactgggaaagggattttcagccctcagaatcgctccaccttgcagctctccccttctctgtattcctagaaactgacacatgctgaacatcacagcttatttcctcatttttataatgtcccttcacaaacccagtgttttaggagcatgagtgccgtgtgtgtgcgtcctgcggagccctgtctcctctctctgtaataaactcatttctagcccg

SEQ ID NO: 190 - DNA, 634 bp, Homo sapiens
cggctgagaggcagcgaactcatctttgccagtacaggagcttgtgccgtggcccacagcccacagcccacagccatgggctgggacctgacggtgaagatgctggcgggcaacgaattccaggtgtccctgagcagctccatgtcggtgtcagagctgaaggcgcagatcacccagaagattggcgtgcacgccttccagcagcgtctggctgtccacccgagcggtgtggcgctgcaggacagggtcccccttgccagccagggcctgggccctggcagcacggtcctgctggtggtggacaaatgcgacgaacctctgagcatcctggtgaggaataacaagggccgcagcagcacctacgaggtccggctgacgcagaccgtggcccacctgaagcagcaagtgagcgggctggagggtgtgcaggacgacctgttctggctgaccttcgaggggaagcccctggaggaccagctcccgctgggggagtacggcctcaagcccctgagcaccgtgttcatgaatctgcgcctgcggggaggcggcacagagcctggcgggcggagctaagggcctccaccagcatccgagcaggatcaagggccggaaataaaggctgttgtaagagaat

SEQ ID NO: 191 - DNA, 4788 bp, Homo sapiens
tttttagaaaaaaaaaatatatttccctcctgctccttctgcgttcacaagctaagttgtttatctcggctgcggcgggaactgcggacggtggcgggcgagcggctcctctgccagagttgatattcactgatggactccaaagaatcattaactcctggtagagaagaaaaccccagcagtgtgcttgctcaggagaggggagatgtgatggacttctataaaaccctaagaggaggagctactgtgaaggtttctgcgtcttcaccctcactggctgtcgcttctcaatcagactccaagcagcgaagacttttggttgattttccaaaaggctcagtaagcaatgcgcagcagccagatctgtccaaagcagtttcactctcaatgggactgtatatgggagagacagaaacaaaagtgatgggaaatgacctgggattcccacagcagggccaaatcagcctttcctcgggggaaacagacttaaagcttttggaagaaagcattgcaaacctcaataggtcgaccagtgttccagagaaccccaagagttcagcatccactgctgtgtctgctgcccccacagagaaggagtttccaaaaactcactctgatgtatcttcagaacagcaacatttgaagggccagactggcaccaacggtggcaatgtgaaattgtataccacagaccaaagcacctttgacattttgcaggatttggagttttcttctgggtccccaggtaaagagacgaatgagagtccttggagatcagacctgttgatagatgaaaactgtttgctttctcctctggcgggagaagacgattcattccttttggaaggaaactcgaatgaggactgcaagcctctcattttaccggacactaaacccaaaattaaggataatggagatctggttttgtcaagccccagtaatgtaacactgccccaagtgaaaacagaaaaagaagatttcatcgaactctgcacccctggggtaattaagcaagagaaactgggcacagtttactgtcaggcaagctttcctggagcaaatataattggtaataaaatgtctgccatttctgttcatggtgtgagtacctctggaggacagatgtaccactatgacatgaatacagcatccctttctcaacagcaggatcagaagcctatttttaatgtcattccaccaattcccgttggttccgaaaattggaataggtgccaaggatctggagatgacaacttgacttctctggggactctgaacttccctggtcgaacagttttttctaatggctattcaagccccagcatgagaccagatgtaagctctcctccatccagctcctcaacagcaacaacaggaccacctcccaaactctgcctggtgtgctctgatgaagcttcaggatgtcattatggagtcttaacttgtggaagctgtaaagttttcttcaaaagagcagtggaaggacagcacaattacctatgtgctggaaggaatgattgcatcatcgataaaattcgaagaaaaaactgcccagcatgccgctatcgaaaatgtcttcaggctggaatgaacctggaagctcgaaaaacaaagaaaaaaataaaaggaattcagcaggccactacaggagtctcacaagaaacctctgaaaatcctggtaacaaaacaatagttcctgcaacgttaccacaactcacccctaccctggtgtcactgttggaggttattgaacctgaagtgttatatgcaggatatgatagctctgttccagactcaacttggaggatcatgactacgctcaacatgttaggagggcggcaagtgattgcagcagtgaaatgggcaaaggcaataccaggtttcaggaacttacacctggatgaccaaatgaccctactgcagtactcctggatgtttcttatggcatttgctctggggtggagatcatatagacaatcaagtgcaaacctgctgtgttttgctcctgatctgattattaatgagcagagaatgactctaccctgcatgtacgaccaatgtaaacacatgctgtatgtttcctctgagttacacaggcttcaggtatcttatgaagagtatctctgtatgaaaaccttactgcttctctcttcagttcctaaggacggtctgaagagccaagagctatttgatgaaattagaatgacctacatcaaagagctaggaaaagccattgtcaagagggaaggaaactccagccagaactggcagcggttttatcaactgacaaaactcttggattctatgcatgaagtggttgaaaatctccttaactattgcttccaaacatttttggataagaccatgagtattgaattccccgagatgttagctgaaatcatcaccaatcagataccaaaatattcaaatggaaatatcaaaaaacttctgtttcatcaaaagtgactgccttaataagaatggttgccttaaagaaagtcgaattaatagcttttattgtataaactatcagtttgtcctgtagaggttttgttgttttattttttattgttttcatctgttgttttgttttaaatacgcactacatgtggtttatagagggccaagacttggcaacagaagcagttgagtcgtcatcacttttcagtgatgggagagtagatggtgaaatttattagttaatatatcccagaaattagaaaccttaatatgtggacgtaatctccacagtcaaagaaggatggcacctaaaccaccagtgcccaaagtctgtgtgatgaactttctcttcatactttttttcacagttggctggatgaaattttctagactttctgttggtgtatcccccccctgtatagttaggatagcatttttgatttatgcatggaaacctgaaaaaaagtttacaagtgtatatcagaaaagggaagttgtgccttttatagctattactgtctggttttaacaatttcctttatatttagtgaactacgcttgctcattttttcttacataattttttattcaagttattgtacagctgtttaagatgggcagctagttcgtagctttcccaaataaactctaaacattaatcaatcatctgtgtgaaaatgggttggtgcttctaacctgatggcacttagctatcagaagaccacaaaaattgactcaaatctccagtattcttgtcaaaaaaaaaaaaaaaaaagctcatattttgtatatatctgcttcagtggagaattatataggttgtgcaaattaacagtcctaactggtatagagcacctagtccagtgacctgctgggtaaactgtggatgatggttgcaaaagactaatttaaaaaataactaccaagaggccctgtctgtacctaacgccctatttttgcaatggctatatggcaagaaagctggtaaactatttgtctttcaggaccttttgaagtagtttgtataacttcttaaaagttgtgattccagataaccagctgtaacacagctgagagacttttaatcagacaaagtaattcctctcactaaactttacccaaaaactaaatctctaatatggcaaaaatggctagacacccattttcacattcccatctgtcaccaattggttaatctttcctgatggtacaggaaagctcagctactgatttttgtgatttagaactgtatgtcagacatccatgtttgtaaaactacacatccctaatgtgtgccatagagtttaacacaagtcctgtgaatttcttcactgttgaaaattattttaaacaaaatagaagctgtagtagccctttctgtgtgcaccttaccaactttctgtaaactcaaaacttaacatatttactaagccacaagaaatttgatttctattcaaggtggccaaattatttgtgtaatagaaaactgaaaatctaatattaaaaatatggaacttctaatatatttttatatttagttatagtttcagatatatatcatattggtattcactaatctgggaagggaagggctactgcagctttacatgcaatttattaaaatgattgtaaaatagcttgtatagtgtaaaataagaatgatttttagatgagattgttttatcatgacatgttatatattttttgtaggggtcaaagaaatgctgatggataacctatatgatttatagtttgtacatgcattcatacaggcagcgatggtctcagaaaccaaacagtttgctctaggggaagagggagatggagactggtcctgtgtgcagtgaaggttgctgaggctctgacccagtgagattacagaggaagttatcctctgcctcccattctgaccacccttctcattccaacagtgagtctgtcagcgcaggtttagtttactcaatctccccttgcactaaagtatgtaaagtatgtaaacaggagacaggaaggtggtgcttacatccttaaaggcaccatctaatagcgggttactttcacatacagccctcccccagcagttgaatgacaacagaagcttcagaagtttggcaatagtttgcatagaggtaccagcaatatgtaaatagtgcagaatctcataggttgccaataatacactaattcctttctatcctacaacaagagtttatttccaaataaaatgaggacatgtttttgttttctttgaatgctttttgaatgttatttgttattttcagtattttggagaaattatttaataaaaaaacaatcatttgctttttg

SEQ ID NO: 192 - DNA, 666 bp, Homo sapiens
tgttaataagaggctgctccctgtgctccatgcctgatccaccacacagaaagcaaattttcagtgcatctccctcttcctgtcagagcttatagaggaaggaagaccccgcaatgtggaggcatattgtattacaattacttttaatggcaaaaactgcagttacttgtgccaacctactacatggtctggacagctaaatgtcatgtatttttcatggcccctccaggtattgtcagagtcctcttgtttggccttctaggaaggctgtgggacccagctttcttcaaccagtccaggtggaggcctctgccttgaacgtttccaagtgaggtaaaacccgcaggcccagaggcctctctacttcctgtgtgaggttcagaaaccctcctcccctcccagcctcaggtgcctgcttcagaaaatggtgagtctctctcttataaagccctcctttttcatcctagcattgggagcaatggccccagggtccttatctctagcagatgttttgaaaaagtcatctgttttgctttttttccagaagtagtaagtctgctggcctccgccatcttagtaaagtaacagtcccatgaaacaaagatgcagtcgggcactcactggagagttctgggcctctgcctcttatcaggtgagtaggatgga

SEQ ID NO: 193 - DNA, 5784 bp, Homo sapiens
acggcatccagtacagaggggctggacttggacccctgcagcagccctgcacaggagaagcggcatataaagccgcgctgcccgggagccgctcggccacgtccaccggagcatcctgcactgcagggccggtctctcgctccagcagagcctgcgcctttctgactcggtccggaacactgaaaccagtcatcactgcatctttttggcaaaccaggagctcagctgcaggaggcaggatggtctggaggctggtcctgctggctctgtgggtgtggcccagcacgcaagctggtcaccaggacaaagacacgaccttcgaccttttcagtatcagcaacatcaaccgcaagaccattggcgccaagcagttccgcgggcccgaccccggcgtgccggcttaccgcttcgtgcgctttgactacatcccaccggtgaacgcagatgacctcagcaagatcaccaagatcatgcggcagaaggagggcttcttcctcacggcccagctcaagcaggacggcaagtccaggggcacgctgttggctctggagggccccggtctctcccagaggcagttcgagatcgtctccaacggccccgcggacacgctggatctcacctactggattgacggcacccggcatgtggtctccctggaggacgtcggcctggctgactcgcagtggaagaacgtcaccgtgcaggtggctggcgagacctacagcttgcacgtgggctgcgacctcataggaccagttgctctggacgagcccttctacgagcacctgcaggcggaaaagagccggatgtacgtggccaaaggctctgccagagagagtcacttcaggggtttgcttcagaacgtccacctagtgtttgaaaactctgtggaagatattctaagcaagaagggttgccagcaaggccagggagctgagatcaacgccatcagtgagaacacagagacgctgcgcctgggtccgcatgtcaccaccgagtacgtgggccccagctcggagaggaggcccgaggtgtgcgaacgctcgtgcgaggagctgggaaacatggtccaggagctctcggggctccacgtcctcgtgaaccagctcagcgagaacctcaagagagtgtcgaatgataaccagtttctctgggagctcattggtggccctcctaagacaaggaacatgtcagcttgctggcaggatggccggttctttgcggaaaatgaaacgtgggtggtggacagctgcaccacgtgtacctgcaagaaatttaaaaccatttgccaccaaatcacctgcccgcctgcaacctgcgccagtccatcctttgtggaaggcgaatgctgcccttcctgcctccactcggtggacggtgaggagggctggtctccgtgggcagagtggacccagtgctccgtgacgtgtggctctgggacccagcagagaggccggtcctgtgacgtcaccagcaacacctgcttggggccctcgatccagacacgggcttgcagtctgagcaagtgtgacacccgcatccggcaggacggcggctggagccactggtcaccttggtcttcatgctctgtgacctgtggagttggcaatatcacacgcatccgtctctgcaactccccagtgccccagatggggggcaagaattgcaaagggagtggccgggagaccaaagcctgccagggcgccccatgcccaatcgatggccgctggagcccctggtccccgtggtcggcctgcactgtcacctgtgccggtgggatccgggagcgcacccgggtctgcaacagccctgagcctcagtacggagggaaggcctgcgtgggggatgtgcaggagcgtcagatgtgcaacaagaggagctgccccgtggatggctgtttatccaacccctgcttcccgggagcccagtgcagcagcttccccgatgggtcctggtcatgcggcttctgccctgtgggcttcttgggcaatggcacccactgtgaggacctggacgagtgtgccctggtccccgacatctgcttctccaccagcaaggtgcctcgctgtgtcaacactcagcctggcttccactgcctgccctgcccgccccgatacagagggaaccagcccgtcggggtcggcctggaagcagccaagacggaaaagcaagtgtgtgagcccgaaaacccatgcaaggacaagacacacaactgccacaagcacgcggagtgcatctacctgggtcacttcagcgaccccatgtacaagtgcgagtgccagacaggctacgcgggcgacgggctcatctgcggggaggactcggacctggacggctggcccaacctcaatctggtctgcgccaccaacgccacctaccactgcatcaaggataactgcccccatctgccaaattctgggcaggaagactttgacaaggacgggattggcgatgcctgtgatgatgacgatgacaatgacggtgtgaccgatgagaaggacaactgccagctcctcttcaatccccgccaggctgactatgacaaggatgaggttggggaccgctgtgacaactgcccttacgtgcacaaccctgcccagatcgacacagacaacaatggagagggtgacgcctgctccgtggacattgatggggacgatgtcttcaatgaacgagacaattgtccctacgtctacaacactgaccagagggacacggatggtgacggtgtgggggatcactgtgacaactgccccctggtgcacaaccctgaccagaccgacgtggacaatgaccttgttggggaccagtgtgacaacaacgaggacatagatgacgacggccaccagaacaaccaggacaactgcccctacatctccaacgccaaccaggctgaccatgacagagacggccagggcgacgcctgtgaccctgatgatgacaacgatggcgtccccgatgacagggacaactgccggcttgtgttcaacccagaccaggaggacttggacggtgatggacggggtgatatttgtaaagatgattttgacaatgacaacatcccagatattgatgatgtgtgtcctgaaaacaatgccatcagtgagacagacttcaggaacttccagatggtccccttggatcccaaagggaccacccaaattgatcccaactgggtcattcgccatcaaggcaaggagctggttcagacagccaactcggaccccggcatcgctgtaggttttgacgagtttgggtctgtggacttcagtggcacattctacgtaaacactgaccgggacgacgactatgctggcttcgtctttggttaccagtcaagcagccgcttctatgtggtgatgtggaagcaggtgacgcagacctactgggaggaccagcccacgcgggcctatggctactccggcgtgtccctcaaggtggtgaactccaccacggggacgggcgagcacctgaggaacgcgctgtggcacacggggaacacgccggggcaggtgcgaaccttatggcacgaccccaggaacattggctggaaggactacacggcctataggtggcacctgactcacaggcccaagaccggctacatcagagtcttagtgcatgaaggaaaacaggtcatggcagactcaggacctatctatgaccaaacctacgctggcgggcggctgggtctatttgtcttctctcaagaaatggtctatttctcagacctcaagtacgaatgcagagatatttaaacaagatttgctgcatttccggcaatgccctgtgcatgccatggtccctagacacctcagttcattgtggtccttgcggcttctctctctagcagcacctcctgtcccttgaccttaactctgatggttcttcacctcctgccagcaaccccaaacccaagtgccttcagaggataaatatcaatggaactcagagatgaacatctaacccactagaggaaaccagtttggtgatatatgagactttatgtggagtgaaaattgggcatgccattacattgctttttcttgtttgtttaaaaagaatgacgtttacatataaaatgtaattacttattgtatttatgtgtatatggagttgaagggaatactgtgcataagccattatgataaattaagcatgaaaaatattgctgaactacttttggtgcttaaagttgtcactattcttgaattagagttgctctacaatgacacacaaatcccgctaaataaattataaacaagggtcaattcaaatttgaagtaatgttttagtaaggagagattagaagacaacaggcatagcaaatgacataagctaccgattaactaatcggaacatgtaaaacagttacaaaaataaacgaactctcctcttgtcctacaatgaaagccctcatgtgcagtagagatgcagtttcatcaaagaacaaacatccttgcaaatgggtgtgacgcggttccagatgtggatttggcaaaacctcatttaagtaaaaggttagcagagcaaagtgcggtgctttagctgctgcttgtgccgttgtggcgtcggggaggctcctgcctgagcttccttccccagctttgctgcctgagaggaaccagagcagacgcacaggccggaaaaggcgcatctaacgcgtatctaggctttggtaactgcggacaagttgcttttacctgatttgatgatacatttcattaaggttccagttataaatattttgttaatatttattaagtgactatagaatgcaactccatttaccagtaacttattttaaatatgcctagtaacacatatgtagtataatttctagaaacaaacatctaataagtatataatcctgtgaaaatatgaggcttgataatattaggttgtcacgatgaagcatgctagaagctgtaacagaatacatagagaataatgaggagtttatgatggaaccttaatatataatgttgccagcgattttagttcaatatttgttactgttatctatctgctgtatatggaattcttttaattcaaacgctgaaaacgaatcagcatttagtcttgccaggcacacccaataatcagtcatgtgtaatatgcacaagtttgtttttgtttttgttttttttgttggttggtttttttgctttaagttgcatgatctttctgcaggaaatagtcactcatcccactccacataaggggtttagtaagagaagtctgtctgtctgatgatggatagggggcaaatctttttcccctttctgttaatagtcatcacatttctatgccaaacaggaacgatccataactttagtcttaatgtacacattgcattttgataaaattaattttgttgtttcctttgaggttgatcgttgtgttgttttgctgcactttttacttttttgcgtgtggagctgtattcccgagacaacgaagcgttgggatacttcattaaatgtagcgactgtcaacagcgtgcaggttttctgtttctgtgttgtggggtcaaccgtacaatggtgtgggaatgacgatgatgtgaatatttagaatgtaccatattttttgtaaattatttatgtttttctaaacaaatttatcgtataggttgatgaaacgtcatgtgttttgccaaagactgtaaatatttatttatgtgttcacatggtcaaaatttcaccactgaaaccctgcacttagctagaacctcatttttaaagattaacaacaggaaataaattgtaaaaaaggttttct

SEQ ID NO: 194 - DNA, 538 bp, Homo sapiens
  modified_base (141): a, t, c, g, other or unknown
  modified_base (185): a, t, c, g, other or unknown
  modified_base (190): a, t, c, g, other or unknown
  modified_base (194): a, t, c, g, other or unknown
  modified_base (202): a, t, c, g, other or unknown
  modified_base (220)..(222): a, t, c, g, other or unknown
  modified_base (227): a, t, c, g, other or unknown
  modified_base (234): a, t, c, g, other or unknown
  modified_base (244): a, t, c, g, other or unknown
  modified_base (292): a, t, c, g, other or unknown
  modified_base (404): a, t, c, g, other or unknown
  modified_base (421): a, t, c, g, other or unknown
  modified_base (443): a, t, c, g, other or unknown
  modified_base (490): a, t, c, g, other or unknown
  modified_base (496): a, t, c, g, other or unknown
  modified_base (522): a, t, c, g, other or unknown
  modified_base (526): a, t, c, g, other or unknown
  modified_base (532): a, t, c, g, other or unknown
agaaaagagggaaggtggggacctagtaacaataaccatttattccaaggaggccctggccctgaacccggggttcccacaggaatcagggaggcacctgagtcccccaggaccagggcatcccaaggcatcatggcagcngcgttgttcaaaaggaagtttcattgagcttcatcttgggaggngtgangcgngtcccganaccgctggacgcccacgnnnctggngtgggtngccgtcggangtctggcccactccgcaccagttcctggcagcgttccacaaagctgcncccaccacggcgccgggcctcagcctgcggggggcttgggctcccacggtggccagacaaggaggtgttgctggaggctgagtggaggctggtgagggagatgcggggtgangggctggggagacagcnccatgagggagctgaaggagcnggcgggggcagctcacagtgtttcagctgttccatcagctcttgctncgttangccacctgcaaggggctggccgaggncgtncatggnggtggt

SEQ ID NO: 195 - DNA, 260 bp, Homo sapiens
  modified_base (18): a, t, c, g, other or unknown
  modified_base (24): a, t, c, g, other or unknown
  modified_base (33): a, t, c, g, other or unknown
  modified_base (42): a, t, c, g, other or unknown
  modified_base (61): a, t, c, g, other or unknown
  modified_base (105): a, t, c, g, other or unknown
  modified_base (140): a, t, c, g, other or unknown
  modified_base (142): a, t, c, g, other or unknown
  modified_base (205): a, t, c, g, other or unknown
  modified_base (214): a, t, c, g, other or unknown
  modified_base (230): a, t, c, g, other or unknown
tggaaataaagcttcctnaatgtngtatatgtntttaaagtncatccgtgcattttttttnagcatccaaccattcctcccttgtagttctcgccccctcaaatnaccctctcccgtagcccacccgactaacatctcantntctgaaaatgcacagagatgcctggctacctcgccctgccttcagcctcacggggctcaggtnctttttttntttggtgccaccaggncggagcatggaggtcacagtacctgccacc

SEQ ID NO: 196 - DNA, 2235 bp, Homo sapiens
atggctgtgctgcctggccctctgcagctgctgggagtgctgcttaccatttccctgagttccatcaggctcattcaggctggtgcctactatgggatcaagccgctgccacctcaaattcctcctcagatgccaccacaaattccacaataccagcccctgggtcagcaagtacctcacatgcctttggccaaagatggcctcgccatgggcaaggagatgccccacttgcagtatggcaaagagtatccacacctaccccaatatatgaaggaaattcaaccggcgccaagaatgggcaaggaagccgttcccaagaaaggcaaagaaataccattagccagtttacgaggggaacaaggtccccgtggagagcctggcccaagaggaccacctgggccccctggtttaccaggtcatgggatacctggaattaaaggaaaaccagggccacagggatatccaggagttggaaagccaggtatgcctggaatgccagggaagccaggagccatgggcatgcctggggcaaaaggagaaattggacagaaaggggaaattgggcctatggggatcccaggaccacaaggacctccagggcctcatggacttcctggcattgggaagccaggtgggccagggttaccagggcaaccaggaccaaagggtgatcgaggacccaaaggactaccaggacctcaaggccttcggggtcctaaaggagacaagggcttcgggatgccaggtgcgccaggtgtaaaggggcctccagggatgcacggcctccccggccctgttggactgccaggagtgggcaaaccaggagtgacaggcttccctgggccccagggccccctgggaaagccaggggctccaggagaacccggtcgacaaggccctattggggtaccgggggttcaaggacctcctgggatacccggaattggaaagccaggccaggatgggatcccaggccagccaggatttccaggtggcaaaggggagcaaggactgccagggctaccaggggccccaggccttccagggattgggaaaccaggcttcccaggacccaaaggtgaccggggcatgggaggtgttcctggggctcttggaccaagaggggagaaaggaccaataggttccccaggaatagggggttctccaggagagccaggcctgcctggaatcccaggtcctatgggccctccaggtgctattggttttcctggacccaaaggagaaggtgggattgtagggccacaggggccaccaggtcccaagggtgagccagggcttcaaggcttcccaggaaagccaggtttccttggtgaagtagggcctcctggcatgaggggtttcccaggtcccataggccccaagggggaacatgggcaaaaaggtgtaccaggactccctggtgttccagggcttctcggacctaagggagaaccaggaatcccaggggatcagggtttacagggccccccaggtatcccagggattgggggccctagtggccccattggaccacctgggattccaggccccaaaggggagcctggcctcccagggccccctgggttccctggtatagggaaacccggagtggcaggacttcatggccccccagggaagcctggtgcccttggtcctcaaggccagcctggccttccaggacccccaggccctccaggacctccaggacccccagctgtgatgccccctacaccaccaccccagggagagtatctgccagatatggggctgggaattgatggcgtgaaacccccccatgctacgggggctaagaaaggcaagaatggagggccagcctatgagatgcctgcatttaccgccgagctaaccgcaccctttccaccggtggggggcccagtgaagtttaacaaactgctgtataacggcagacagaactacaacccgcagacaggcatcttcacctgtgaggtccctggtgtctactactttgcataccacgttcactgcaagggggggaacgtgtgggttgctctattcaagaacaacgagcccgtgatgtacacgtacgacgagtacaaaaagggcttcctggaccaggcatctgggagtgcagtgctgctgctcaggcccggagaccgggtgttcctccagatgccctcagaacaggctgcaggactgtatgccgggcagtatgtccactcctccttttcaggatatttattgtatcccatgtaa

SEQ ID NO: 197 - DNA, 276 bp, Homo sapiens
  modified_base (169): a, t, c, g, other or unknown
  modified_base (244): a, t, c, g, other or unknown
acccacagggcccctacccacaagagggctacccacagggcccctacccccaagggggctacccccaggggccatatccccagagccccttcccccctatcccctatggacagccacaggtcttcccaggacaagaccctgactcaccccagcatggaaactaccaggnggagggtcccccatcctactatgacaaccaggactttcctgccaacaactgggatgacaagagcatccgacaagncttcatccgcaagtgttcctagtgcttgacct

SEQ ID NO: 198 - DNA, 443 bp, Homo sapiens
  modified_base (1): a, t, c, g, other or unknown
  modified_base (59): a, t, c, g, other or unknown
  modified_base (344): a, t, c, g, other or unknown
  modified_base (352): a, t, c, g, other or unknown
  modified_base (410): a, t, c, g, other or unknown
ngttatcaaccaggtagtggacttctaccaacccacgtgcattgtgctccagtgtggantggactctctgggctgtgatcgattgggctgctttaacctcagcatccgagggcatggggaatgcgttgaatatgtcaagagcttcaatatccctctactcgtgctgggtggtggtggttatactgtccgaaatgttgcccgctgctggacatatgagacatcgctgctggtagaagaggccattagtgaggagcttccctatagtgaatacttcgagtactttgccccagacttcacacttcatccagatgtcagcaccctcatcgagaatcagaacttcacgncatatctnggaaccagatccgccagacaatctttgaaaaccctggaagatgctggaacctggcacntagtgttccagattcatggacgtgcctgcagac

SEQ ID NO: 199 - DNA, 853 bp, Homo sapiens
gggcctggagctgcacccgcttctgggtggacgcacttggcgagcggcgcgggatgcagacggctgcgaggcgctgggcacagttgctgtcccctttgacgatgatgacaagattgttgggggctacacctgtgaggagaattctctcccctaccaggtgtccctgaattctggctcccacttctgcggtggctccctcatcagcgaacagtgggtggtatcagcagctcactgctacaagacccgcatccaggtgagactgggagagcacaacatcaaagtcctggaggggaatgagcagttcatcaatgcggccaagatcatccgccaccctaaatacaacagggacactctggacaatgacatcatgctgatcaaactctcctcacctgccgtcatcaatgcccgcgtgtccaccatctctctgcccaccgcccctccagctgctggcactgagtgcctcatctccggctggggcaacactctgagctttggtgctgactacccagacgagctgaagtgcctggatgctccggtgctgacccaggctgagtgtaaagcctcctaccctggaaagattaccaacagcatgttctgtgtgggcttccttgagggaggcaaggattcctgccagcgtgactctggtggccctgtggtctgcaacggacagctccaaggagttgtctcctggggccatggctgtgcctggaagaacaggcctggagtctacaccaaggtctacaactatgtggactggattaaggacaccatcgctgccaacagctaaagcccccggtccctctgcagtctctataccaataaagtggccctgctctcaaaaaaaaaaaaaaaa

SEQ ID NO: 200 - DNA, 256 bp, Homo sapiens
ggatgctgtaaaagtagaagaggaattgaccctatcttggacagcacctggagaagactttgatcagggccaggctacaagctatgaaataagaatgagtaaaagtctacagaatatccaagatgactttaacaatgctattttagtaaatacatcaaagcgaaatcctcagcaagctggcatcagggagatatttacgttctcaccccaaatttccacgaatggacctgaacatcagccaaatggagaaacacat

SEQ ID NO: 201 - DNA, 6210 bp, Homo sapiens
gcaggaacagtgctagtattgctcgagcccgagggctggaggttaggggatgaaggtctgcttccacgctttgcactgaattagggctagaattggggatgggggtaggggcgcattccttcgggagccgaggcttaagtcctcggggtcctgtactcgatgccgtttctcctatctctgagcctcagaactgtcttcagtttccgtacaagggtaaaaaggcgctctctgccccatcccccccgacctcgggaacaagggtccgcattgaaccaggtgcgaatgttctctctcattctgcgccgttcccgcctcccctcccccagccgcggcccccgcctccccccgcactgcaccctcggtgttggctgcagcccgcgagcagttcccgtcaatccctccccccttacacaggatgtccatattaggacatctgcgtcagcaggtttccacggcctttccctgtagccctggggggagccatccccgaaacccctcatcttggggggcccacgagacctctgagacaggaactgcgaaatgctcacgagattaggacacgcgccaaggcgggggcagggagctgcgagcgctggggacgcagccgggcggccgcagaagcgcccaggcccgcgcgccacccctctggcgccaccgtggttgagcccgtgacgtttacactcattcataaaacgcttgttataaaagcagtggctgcggcgcctcgtactccaaccgcatctgcagcgagcaactgagaagccaagactgagccggcggccgcggcgcagcgaacgagcagtgaccgtgctcctacccagctctgcttcacagcgcccacctgtctccgcccctcggcccctcgcccggctttgcctaaccgccacgatgatgttctcgggcttcaacgcagactacgaggcgtcatcctcccgctgcagcagcgcgtccccggccggggatagcctctcttactaccactcacccgcagactccttctccagcatgggctcgcctgtcaacgcgcaggtaaggctggcttcccgtcgccgcggggccgggggcttggggtcgcggaggaggagacaccgggcgggacgctccagtagatgagtagggggctcccttgtgcctggagggaggctgccgtggccggagcggtgccggctcgggggctcgggacttgctctgagcgcacgcacgcttgccatagtaagaattggttcccccttcgggaggcaggttcgttctgagcaacctctggtctgcactccaggacggatctctgacattagctggagcagacgtgtcccaagcacaaactcgctaactagagcctggcttcttcggggaggtggcagaaagcggcaatcccccctcccccggcagcctggagcacggaggagggatgagggaggagggtgcagcgggcgggtgtgtaaggcagtttcattgataaaaagcgagttcattctggagactccggagcggcgcctgcgtcagcgcagacgtcagggatatttataacaaaccccctttcaagcaagtgatgctgaagggataacgggaacgcagcggcaggatggaagagacaggcactgcgctgcggaatgcctgggaggaaaagggggagacctttcatccaggatgagggacatttaagatgaaatgtccgtggcaggatcgtttctcttcactgctgcatgcggcactgggaactcgccccacctgtgtccggaacctgctcgctcacgtcggctttccccttctgttttgttctaggacttctgcacggacctggccgtctccagtgccaacttcattcccacggtcactgccatctcgaccagtccggacctgcagtggctggtgcagcccgccctcgtctcctctgtggccccatcgcagaccagagcccctcaccctttcggagtccccgccccctccgctggggcttactccagggctggcgttgtgaagaccatgacaggaggccgagcgcagagcattggcaggaggggcaaggtggaacaggtgaggaactctagcgtactcttcctgggaatgtgggggctgggtgggaagcagccccggagatgcaggagcccagtacagaggatgaagccactgatggggctggctgcacatccgtaactgggagccctggctccaagcccattccatcccaactcagactctgagtctcaccctaagaagtactctcatagtttcttccctaagtttcttaccgcatgctttcagactgggctcttctttgttctcttgctgaggatcttattttaaatgcaagtcacacctattctgcaactgcaggtcagaaatggtttcacagtggggtgccaggaagcagggaagctgcaggagccagttctactggggtgggtgaatggaggtgatggcagacacttttactgaatgtcggtctttttttgtgattattctagttatctccagaagaagaagagaaaaggagaatccgaagggaaaggaataagatggctgcagccaaatgccgcaaccggaggagggagctgactgatacactccaagcggtaggtactctgtgggttgctcctttttaaaacttaagggaaagttggagattgagcataagggcccttgagtaagactgtgtcttatgctttcctttatccctctgtatacaggagacagaccaactagaagatgagaagtctgctttgcagaccgagattgccaacctgctgaaggagaaggaaaaactagagttcatcctggcagctcaccgacctgcctgcaagatccctgatgacctgggcttcccagaagagatgtctgtggcttcccttgatctgactgggggcctgccagaggttgccaccccggagtctgaggaggccttcaccctgcctctcctcaatgaccctgagcccaagccctcagtggaacctgtcaagagcatcagcagcatggagctgaagaccgagccctttgatgacttcctgttcccagcatcatccaggcccagtggctctgagacagcccgctccgtgccagacatggacctatctgggtccttctatgcagcagactgggagcctctgcacagtggctccctggggatggggcccatggccacagagctggagcccctgtgcactccggtggtcacctgtactcccagctgcactgcttacacgtcttccttcgtcttcacctaccccgaggctgactccttccccagctgtgcagctgcccaccgcaagggcagcagcagcaatgagccttcctctgactcgctcagctcacccacgctgctggccctgtgagggggcagggaaggggaggcagccggcacccacaagtgccactgcccgagctggtgcattacagagaggagaaacacatcttccctagagggttcctgtagacctagggaggaccttatctgtgcgtgaaacacaccaggctgtgggcctcaaggacttgaaagcatccatgtgtggactcaagtccttacctcttccggagatgtagcaaaacgcatggagtgtgtattgttcccagtgacacttcagagagctggtagttagtagcatgttgagccaggcctgggtctgtgtctcttttctctttctccttagtcttctcatagcattaactaatctattgggttcattattggaattaacctggtgctggatattttcaaattgtatctagtgcagctgattttaacaataactactgtgttcctggcaatagtgtgttctgattagaaatgaccaatattatactaagaaaagatacgactttattttctggtagatagaaataaatagctatatccatgtactgtagtttttcttcaacatcaatgttcattgtaatgttactgatcatgcattgttgaggtggtctgaatgttctgacattaacagttttccatgaaaacgttttattgtgtttttaatttatttattaagatggattctcagatatttatatttttattttatttttttctaccttgaggtcttttgacatgtggaaagtgaatttgaatgaaaaatttaagcattgtttgcttattgttccaagacattgtcaataaaagcatttaagttgaatgcgaccaaccttgtgctcttttcattctggaagtcttgtaagtttctgaaaggtattattggagaccagtttgtcaagaagggtagctgctggagggggacacaccctctgtctgatcccttatcaaagaggacaaggaaactatagagctgattttagaatattttacaaatacatgccttccattggaatgctaagattttctactgcttctggggacgggaaaccgctgtgtaacagcttttgtgggaatacattttttctgtttcagtactcgcagggggaaatatttaaattttgttgtgctaatattaaattcagatgttttgatcttaaaggaaccctttaagcaaacagaacctagctttgtacagactattttaactttttattctcacaaaatcacgtggagggttattctacttcaaagatgagcaaattgaagaatggttagaataaacaactttcttgatattccgttatcggcattagaatcttcctgctcgttatcgtatccagcaggctgaactgcctcttgatacttggttaaaaaaaattttcaggccgggcgcggtggcccatgcctgtaatcctagcactttgggaggccgaggcaggcggatcacctgaggtcgggagttcgagaccagcctgaccaacatggagaaaccccgtctttactaaaaatacaaaattagcctggtgtggtggtgcatgcctgtaatcctagctacttgagaggctgagacaggaaaatcacttgaactcgggaggcggatgttgcagcgaactgagattgcgccattgcactccagcctgggcaacaagattgaaactctgtttaaaaaaaaaagttttcactaatgtgtacatttttttgtactcttttattctcgaaagggaaggagggctattgccctatcccttattaataaatgcattgtggtttctggtttctctaataccatatgcccttcattcagtttatagtgggcggaagtgggggagaaaaagttgctcagaaatcaaaagatatctcaaacagcacaaataatggctgatcgttctgcaaacaaaaagttacataatagctcaagaaggagaagtcaacatgactctgaacaagctttaacttagaaactttatcatcttaaggaagaacgtgacctttgtccaggacgtctctggtaatggggcacttacacacacatgcacacgtacaaaccacagggaaaggagaccgcccttctgcctctgctcgcgagtatcacgcaggcaccatgcactatgttttcacacacactgggtggaagaagagcttcagcgccagtcttctaatgctttggtgataatgaaaatcactgggtgcttatggggtgtcatattcaatcgagttaaaagttttaattcaaaatgacagttttactgaggttgatgttctcgtctatgatatctctgcccctcccataaaaatggacatttaaaagcaacttaccgctctttagatcactcctatatcacacaccacttggggtgctgtttctgctagacttgtgatgacagtggccttaggatccctgtttgctgttcaaagggcaaatattttatagcctttaaatatacctaaactaaatacagaattaatataactaacaaacacctggtctgaaataacaaggtgatctaccctggaaggaacccagctggtgggccaggagcggtggctcacacctgtaattccagcactttgggaggctgagacaggaggatcactggagtccaggagtttgagaccagcctgggcaacatggcaaaacccagtgtgcttctgttgtcccagctacactactcaggaggctgaggcaggagtatgacttgagcctgggagggggaggttgcagagaactgatattgcaccaccactgcactccagcctgggtgacacagcaaaaccctatctcaaaaaaaaaaaaaaaaaaaaggaacccagctggttcctgtaggtgtgcaataataacaaccagaggaagaaaaggaagacgatttcccagatgaagaagggcagctggaccttcggac

SEQ ID NO: 202 - DNA, 7515 bp, Homo sapiens
atggaggaggtggtgattgccggcatgttcgggaagctgccagagtcggagaacttgcaggagttctgggacaacctcatcggcggtgtggacatggtcacggacgatgaccgtcgctggaaggctgggctctacggcctgccccggcggtccggcaagctgaaggacctgtctaggtttgatgcctccttcttcggagtccaccccaagcaggcacacacgatggaccctcagctgcggctgctgctggaagctacctatgaagccatcgtggacggaggcatcaacccagattcactccgaggaacacacactggcgtctgggtgggcgtgagcggctctgagacctcggaggccctgagccgagaccccgagacactcgtgggctacagcatggtgggctgccagcgagcgatgatggccaaccggctctccttcttcttcgacttcagagggcccagcatcgcactggacacagcctgctcctccagcctgatggccctgcagaacgcctaccaggccatccacagcgggcagtgccctgccgccatcgtggggggcatcaacgtcctgctgaagcccaacacctccgtgcagttcttgaggctggggatgctcagccccgagggcacctgcaaggccttcgacacagcggggaatgggtactgccgctcggagggtgtggtggctgtcctgctgaccaagaagtccctggcccggaaggtctacaccaccatcctgaacaaaggcaccaatacagatggcttcaaggagcaaggcgtgaccttccctcaggatatccaggagcagcctatccgctcgttgtaccagtcggccggagtggcccctgagtcatttgaatacatcgaagcccacggaccaggcaccaaggtgggcgacccccaggagcgtaatggcatcacccgagccctgtgcgccacccgccaggagccgctgctcatcggctccaccaagtccaacatggggcacccggagccagcctcggggctcgacgccctggccaaggtgctgctgtccctggagcacgggctctgggcccccaacctgcacttccatagccccaaccctgagatcccagcgctgttggatgggcggctgcaggtggtggaccagcccctgcccgtccgtggcggcaacgtgggcatcaactcctttggcttcgggggctccaacatgcacatcatcctgaggcccaacacgcagtccgcccccgcacccgccccacatgccaccctgccccgtctgctgcgggccagcggacgcacccctgaggccgtgcagaagctgctggagcagggcctccggcacagccagggcctggctttcctgagcatgctgaacgacatcgcggctgtccccgccaccgccatgcccttccgtggctacgctgtgctgggtggtgagacgcggtggcccagagtgcagcaggtgcccgctggcgagcgcccgctctggttcatctgctctgggatgggcacacagtggcgtggaatggggctgagccttatgcgcctggaccgcttccgagattccatcctacgctccgatgaggctgtgaaccgattcggcctgaaggtgtcacagctgctgctgagcacagacgagagcacctttgatgacatcgtccattcgtttgtgagcctgactgccatccagataggcctcatagacctgctgagctgcatgggacctgaggcagatggcatcgtcggccactccctgggggagtggctgtcggtacgcgacggctgcctgtcccaggaggaggccgtcctcgctgcctactggaggggacagtgcatcaaagaagccccacttcccgccggcgccatggcagccgtgggcttgtcctgggaggagtgtaaacagcgctgcccccctgcggtggtgcccgcctgccacaactccaaggacacagtcaccatctcgggacctcaggccccggtgtttgagttcgtggagcagctgaggaaggagggtgtgtttgccaaggaggtgcggaccggcggtatggccttccactcctacttcatggaggccatcgcacccccactgctgcaggagctcaagaaggtgatccgggagccgaagccacgttcagcccgctggctcagcacctctatccccgaggcccagtggcacagcagcctggcacgcacgtcttccgccgagtacaatgtcaacaacctggtgagccctgtgctgttccaggaggccctgtggcacgtgcctgagcacgcggtggtgctggagatcgccccgaccccgtgccctcaggctgtcctgaagcgggtccgtaagccgagctgcaccatcatcccccgtatgaagaaggatcacagggacaacctggagttcttcctggccggcatcggcaggctgcacctctcaggcatcgacgccaaccccaatgccttgttcccacctgtggagtccccagctccccgaggaactcccctcatctccccactcatcaagtgggaccacagcctggcctgggacgcgccggccgccgaggacttccccaacggttcaggttccccctcagccaccatctacacatgcacaccaagctccgagtctcctgaccgctacctggtggaccacaccatcgacggtcgcgtcctcttccccgccactggctacctgagcatagtgtggaagacgctggcccgcgcctgggctgggctcgagcagctgcctgtggtgtttgaggatgtggtgcagcaccaggccaccatcctgcccaagactgggacagtgtccttggaggtacggctcctggaggccaccggtgccttcgaggtgtcagagaacggcaacctggtagtgagtgggaaggtgtaccagtgggatgaccctgaccccaggctcttcgaccacccggaaagtccccaccccaattccccacggagtcccctcttcctggcccaggcagaagtttacaaggagctgcgtctgcgtggctacgactacggccctcatttccagggcatcctggaggccagcctggaaggtgactcggggaggctgctgtggaaggataactgggtgagcttcatggacaccatgctgcagatgtccatcctgggctcggccaagcacggcctgtacctacccacccgtgtcaccgccatccacatcgaccctgccacccacaggcagaagctgtacacactgcaggacaaggcccaagtggctgacgtggtggtgagcaggtggccgagggtcacagtggcgggaggcgtccacatctccgggctccacactgagtcggccccgcggcggcacgaggagcagcaggtgcccatcctggagaagttttgcttcactccccacacggaggaggggtgcctgtctgagcacgctgccctcgaggaggagctgcaactgtgcaaggggctggtcgaggcactcgagaccaaggtgacccagcaggggctgaagatggtggtgccggactggacggggcccagatccccccgggacccctcacagcaggaactgccccggctgttgtcggctgcctgcaggcttcagctcaacgggaacctgcagctggagctggcgcaggtgctggcccaggagaggcccaagctgccagaggaccctctgctcagcggcctcctggactccccggcactcaaggcctgcctggacactgccgtggagaacatgcccagcctgaagatgaaggtggtggaggtgctggccggccacggtcacctgtattcccgcatcccaggcctgctcagcccccatcccctgctgcagctgagctacacggccaccgaccgccacccccaggccctggaggctgcccaggccgagctgcagcagcacgacgttgcccagggccagtgggatcccgcagaccctgcccccagcgccctgggcagcgcggacctcctggtgtgcaactgtgctgtggctgccctcggggacccggcctcagctctcagcaacatggtggctgccctgagagaagggggctttctgctcctgcacacactgctccgggggcaccctcgggacatcgtggccttcctcacctccactgagccgcagtatggccagggcatcctgagccaggacgcgtgggagagcctcttctccagggtgtcgctgcgcctggtgggcctgaagaagtccttctacggcgccacgctcttcctgtgccgccggcccaccccgcaggacagccccatcttcctgccggtggacgataccagcttccgctgggtggagtctctgaagggcatcctggctgacgaagactcttcccggcctgtgtggctgaaggccatcaactgtgccacctcgggcgtggtgggcttggtgaactgtctccgccgagagcccggcggaaccgtccggtgtgtgctgctctccaacctcagcagcacctcccacgtcccggaggtggacccgggctccgcagaactgcagaaggtgttgcagggagacctggtgatgaacgtctaccgcgacggggcctggggggttttccgccacttcctgctggaggacaagcctgaggagccgacggcacatgcctttgtgagcaccctcacccggggggacctgtcctccatccgctgggtctgctcctcgctgcgccatgcccagcccacctgccctggcgcccagctctgcacggtctactacgcctccctcaacttccgcgacatcatgctggccactggcaagctgtcccctgatgccatcccagggaagtggacctcccaggacagcctgctaggtatggagttctcgggccgagacgccagcggcaagcgtgtgatgggactggtgcctgccaagggcctggccacctctgtcctgctgtcaccggacttcctctgggatgtgccttccaactggacgctggaggaggcggcctcggtgcctgtcgtctacagcacggcctactacgcgctggtggtgcgtgggcgggtgcgccccggggagacgctgctcatccactcgggctcgggcggcgtgggccaggccgccatcgccatcgccctcagtctgggctgccgcgtcttcaccaccgtggggtcggctgagaagcgggcgtacctccaggccaggttcccccagctcgacagcaccagcttcgccaactcccgggacacatccttcgagcagcatgtgctgtggcacacgggcgggaagggcgttgacctggtcttgaactccttggcggaagagaagctgcaggccagcgtgaggtgcttcggtacgcacggtcgcttcctggaaattggcaaattcgacctttctcagaaccacccgctcggcatggctatcttcctgaagaacgtgacattccacggggtcctactggatgcgttcttcaacgagagcagtgctgactggcgggaggtgtgggcgcttgtcgaggccgccatccgggatggggtggtacggcccctcaagtgcacggtgttccatggggcccaggtggaggacgccttccgctacatggcccaagggaagcacattggcaaagtcgtcgtgcaggtgcttgcggaggagccggcagtgctgaagggggccaaacccaagctgatgtcggccatctccaagaccttctgcccggcccacaagagctacatcatcgctggtggtctgggtggcttcggcctggagttggcgcagtggctgatacagcgtggggtgcagaagctcgtgttgacttctcgctccgggatccggacaggctaccaggccaagcaggtccgccggtggaggcgccaggggctacaggtgcaggtgtccaccagcaacatcagctcactggagggggcccggggcctcattgccgaggcggcgcagcttgggcccgtggggggcgtcttcaacctggccgtggtcttgagagatggcttgctggagaaccagaccccagagttcttccaggacgtctgcaagcccaagtacagcggcaccctgaacctggacagggtgacccgagaggcgtgccctgagctggactactttgtggtcttctcctctgtgagctgcgggcgtggcaatgcgggacagagcaactacggctttgccaattccgccatggagcgtatctgtgagaaacgccggcacgaaggcctcccaggcctggccgtgcagtggggcgccatcggcaccgtgggcattttggtggagacgatgagcaccaacgacacgatcgtcagtggcacgctgcccacgcgcattggcgtccttggcctggaggtgctggacctcttcctgaaccagccccacatggtcctgagcagctttgtgctggctgagaaggctgcggcctatagggacagggacagccagcgggacctggtggaggccgtggcacacatcctgggcatccgcgacttggctgctgtcaacctgggcggctcactggcggacctgggcctggactcgctcatgagcgcgccggtgcgccagacgctggagcgtgagctcaacctggtgctgtccgtgcgcgaggtgcggcaactcacgctccggaaactgcaggagctgtcctcaaaggcggatgaagccagcgagctggcatgccccacgcccaaggaggatggtctggcccagcagcagactcagctgaacctgcgctccctgctggtgaaaccggagggccccaccctgatgcggctcaactccgtgcagagctcggagcggcccctgttcctggtgcacccaatcgaggctaccaccgtgttccacagcctcggtcccggtctcagcatccccacctatggcctgcagtgcaccccggctgcgccccttgacagcatccacagcctggctgcctactacatcgactgcatcaggcaggtgcagcccgagggcccctaccgcgtggccggctactcctacggggcctgcgtggcctttgaaatgtgctcccagctgcaggcccagcagagcccagcccccacccacaacagcctcttcctgttcgacggctcgcccacctacgtactggcctacacccagagctaccgggcaaagctgaccccaggctgtaaggctgaggctgagacggaggccatatgcttcttcgtgcagcagttcacggacatggagcacaacagggtgctggaggcgctgctgccgctgaagggcctagaggagcgtgtggcagccgccgtggacctgatcatcaagagccaccagggcctggaccgccaggagctgagctttgcggcccggtccttctactacaggctgcgtgccgctgaccagtatacacccaaggccaagtacagtggcaacgtgatgctactgcgggccaagacgggtggccgctacggcgaggacctgggcgcggactacaacctctcccaggtatgcgacgggaaagtatccgtccatatcatcgagggtgaccaccgcacgctgctggagggcagcggcctggagtccatcatcagcatcatccacagctccctggctgagccacgtgtgagtcgggagggctag

SEQ ID NO: 203 - DNA, 420 bp, Homo sapiens
  modified_base (371): a, t, c, g, other or unknown
  modified_base (384): a, t, c, g, other or unknown
  modified_base (402): a, t, c, g, other or unknown
  modified_base (416): a, t, c, g, other or unknown
acttttattgtcatccagcacctgtgatagtttcatgtctctctaaaggagacaggaaattggagcattgtgggcccttttaaaagaaaagaggagtaggtaggcacacccaggtgcttctaaaacaaccaagcccaaacctgacatgctcctccccacagtcaccttcattgtcccctttaaaagtctggaacagtatgtagcaaaacaaataaattacttttcatttcaaaagtaagtccaaaggttgaagctgcctaggccaggggttctgggacagggtgcctccaaaggaagtgaggctttccttttcaacttccttaggctctagccagtaggaccaggaaacccctgcttttccacatcagggnttccaggatgggngttttaggttaggacttngggggatcccgttngctt

SEQ ID NO: 204 - DNA, 3457 bp, Homo sapiens
cctccacctcccgggttcaagcgattctcctgcctcagcctcccgagtagctgagactacaggcacgcgccaccacgcccagctaatttttgtatctttagtagagacgggctttcaccatgttggccaggatggtctcgatgtcttaacgtcgtgatccggccgcctcggcctcccaagtgctgggattacaggcgttagccactgcgcccggccccagccaggcagttttaatcgagcgctcacaaccactgagacgcagcgaagcacccaccataatatcccaggaggccgaccgccggttcagactttttcttttctttaatccccgtccaagggatccgccctcaccccccaccccagccaccccaattccctattccctccccttggacggcgccggggaaaacaagctgctcgagctttatttcttcggtgcaaccaactcagaatgaattcctccgcccctgcgtgctcagtgagtcggcaccctagcagtgaactgcatttaaaacctcaggaattgagcgaactctcccagtggctctcctcaccgggatccccttccacgcctcctccccgtgccgcgcctcagtccgcactgctcattggccgcgtgcctgccaatccgatgcacgtcggctagggcaaagaccgcgaaaaagcgcgtacacctggctctgggagcgcgcgcctaacgccagccagcagcaggaggcgcgcgaggcaccacggcctggcggccgagagtcagggaggaacctcatttacataacggccgcccctctgtctcctggcgggggccggagtcccgcccctcgtccaacttgaaatctgttgggtcacgggccagtcactccgacctaggcaagcctgtggtggagctggaagagtttgtgagggcggtcccgggagcggattgggtctgggagttcccagaggcggctataagaaccgggaactgggcgcggggagctgagttgctggtagtgcccgtggtgcttggttcgaggtggccgttagttgactccgcggagttcatctccctggttttcccgtcctaacgtcgctcgcctttcagtcaggatgtctgcccgtggcccggctatcggcatcgacctgggcaccacctattcgtgcgtcggggtcttccaacatggcaaggtggagatcatcgccaacgaccagggcaatcgcaccacccccagctacgtggccttcacggacaccgagcgcctcatcggcgacgccgccaagaaccaggtggccatgaaccccaccaacaccatcttcgacgccaagaggctgattggacggaaattcgaggatgccacagtgcagtcggatatgaaacactggccgttccgggtggtgagcgagggaggcaagcccaaagtgcaagtagagtacaagggggagaccaagaccttcttcccagaggagatatcctccatggtcctcacgaagatgaaggagatcgcggaagcctacctggggggcaaggtgcacagcgcggtcataacggtcccggcctatttcaacgactcgcagcgccaggccaccaaggacgcaggcaccatcacggggctcaatgtgctgcgcatcatcaacgagcccacggcggcggccatcgcctacggcctggacaagaagggctgcgcgggcggcgagaagaacgtgctcatctttgacctgggcggtggcactttcgacgtgtccatcctgaccatcgaggatggcatcttcgaggtgaagtccacggccggcgatacccacctgggcggtgaggacttcgacaaccgcatggtgagccacctggcggaggagttcaagcgcaagcacaagaaggacattgggcccaacaagcgcgccgtgaggcggctgcgcaccgcttgcgagcgcgccaagcgcaccctgagctcgtccacgcaggcgagcatcgagatcgactcgctctacgagggcgtggacttctatacgtccatcacgcgcgcccgcttcgaggagctcaatgccgacctctttcgcgggaccctggagccggtggagaaggcgctgcgcgacgccaagctggacaagggccagatccaggagatcgtgctggtgggcggctccactcgtatccccaagatccagaagctgctgcaggatttcttcaacggcaaggagctgaacaagagcatcaaccccgacgaggcggtggcctatggcgccgcggtgcaggcggccatcctcatcggcgacaaatcagagaatgtgcaggacctgctgctactcgacgtgaccccgttgtcgctgggcatcgagacagctggcggtgtcatgaccccactcatcaagaggaacaccacgatccccaccaagcagacgcagaccttcaccacctactcggacaaccagagcagcgtactggtgcaggtatacgagggcgaacgggccatgaccaaggacaataacctgctgggcaagttcgacctgaccgggattccccctgcgcctcgcggggtcccccaaatcgaggttaccttcgacattgacgccaatggcatccttaacgttaccgccgccgacaagagcaccggtaaggaaaacaaaatcaccatcaccaatgacaaaggtcgtctgagcaaggacgacattgaccggatggtgcaggaggcggagcggtacaaatcggaagatgaggcgaatcgcgaccgagtcgcggccaaaaacgccctggagtcctatacctacaacatcaagcagacggtggaagacgagaaactgaggggcaagattagcgagcaggacaaaaacaagatcctcgacaagtgtcaggaggtgatcaactggctcgaccgaaaccagatggcagagaaagatgagtatgaacacaagcagaaagagctcgaaagagtttgcaaccccatcatcagcaaactttaccaaggtggtcctggcggcggcagcggcggcggcggttcaggagcctccgggggacccaccatcgaagaagtggactaagcttgcactcaagtcagcgtaaacctctttgcctttctctctctctcttttttttttgtttgtttctttgaaatgtccttgtgccaagtacgagatctattgttggaagtctttggtatatgcaaatgaaaggagaggtgcaacaacttagtttaattataaaagttccaaagtttgttttttaaaaacattattcgaggtttctctttaatgcattttgcgtgtttgctgacttgagcatttttgattagttcgtgcatggagatttgtttgagatgagaaaccttaagtttgcacacctgttctgtagaagcttggaaacagtaaaatatataggagcttaaattgtttatttttatgtactactttaaaactaaactgaacattgcagtaatgttaaggacaggtatactttttgcaaacaaatgcataaatgcaaatgtaaagtaaa

SEQ ID NO: 205 - DNA, 1579 bp, Homo sapiens
ccgggccgtgacagacggccggcagaggaagggagagaggcggcggcgacaccatgtcatctcccagtccgggcaagaggcggatggacacggacgtggtcaagctcatcgagagtaaacatgaggttacgatcctgggaggacttaatgaatttgtagtgaagttttatggaccacaaggaacaccatatgaaggcggagtatggaaagttagagtggacctacctgataaataccctttcaaatctccatctataggattcatgaataaaattttccatcccaacattgatgaagcgtcaggaactgtgtgtctagatgtaattaatcaaacttggacagctctctatgatcttaccaatatatttgagtccttcctgcctcagttattggcctatcctaaccccatagatcctctcaatggtgacgctgcagccatgtacctccaccgaccagaagaatacaagcagaaaattaaagagtacatccagaaatacgccacggaggaggcgctgaaagaacaggaagagggtaccggggacagctcatcggagagctctatgtctgacttttccgaagatgaggcccaggatatggagttgtagtagaaaaagcacctgcttttcagaaagactattatttcctaaccatgagaagcagactataatattcatatttaaacaaagcaattttttttattactaaacaaggtttttatgaataatagcattgatatatatatattatatatcaccctttagatcttgatttcttggtcatttctcaacctgaggtgcatagcatattcccacattccatttggtagcaatatgcggtctgaatgcatgcattcatgagtccatgtggccaagtcagcctgtgtgctactgaactgtcgaaggaaatagccgctctgataggtagatgtgagtaaaaagaacaggaaaaaattgcttcttttattggtttccaaagaaacaaaccaaaccaaccagctcttggatgtgaagataaaatagtgcttttttgaaatggagaggaaaaacttggggaggaagaggcctgctgtgggggcatcggagccagccatgtaagaatcagagctgctccttcctgtgaatcctaggtggccctatgtcttctgtggagttacagtataaagcagggagctaattaagagtattaaaacttaaaaccattttttgactctgattttaagtacatttttatatgtcagttgctgcccttcacactaccaggccctgcagccacagtgttctgttggagaaacttggggaagtgttttctgaaccagttctttttcttggggtagagcgtgaaatccagacctgtttttgaaaggacagcacaggaggagaaaagtgactgggacgatgcttcctctcatccaaaacacatgcagagtcacatcctcatcctagtgtttggcagtttgagaccgctaccctgaacttaagagctttaaatatgagggttgtgtttctgggggggttatttttttggtgtgtgtgtgtgtgtattgtgcttagaaaggttgcagatttcatcttcacctacc

SEQ ID NO: 206 - DNA, 151 bp, Homo sapiens
gagcctaagtgggagccagaccacgcaggagctggagaacgtggggcgcattgtccaggtgttgaggctgctcagggctctgcgcatgctaaagctgggcagacattccacaggattacgctccgttgggatgacaatcacccagtgttac

SEQ ID NO: 207 - DNA, 420 bp, Homo sapiens; identical to SEQ ID NO: 147

SEQ ID NO: 208 - DNA, 1610 bp, Homo sapiens
ggcggtgctctacgtcttcaccgctggagatctgctgccccgggcaggtccccgtttcctcacgcggctcttcgaaggctctggggaggcccgagggggcggccgctctagggaagggaccatggagctccgaactacccctcagctgaaagtggtggggcagggccgcggcaatggagacccggggggtgggatggagaaggacggtccggaatgggacctttgacagcagaccctacaacctgctgcccttccctgtccctttccaccccccacccaccctccagaggtcctcccgacggccatgaacactacatcttctgcagcacccccctcactaggtgtagagttcatctctctgctggctatcatcctgctgtcagtggcgctggctgtggggcttcccggcaacagctttgtggtgtggagtatcctgaaaaggatgcagaagcgctctgtcactgccctgatggtgctgaacctggccctggccgacctggccgtattgctcactgctccctttttccttcacttcctggcccaaggcacctggagttttggactggctggttgccgcctgtgtcactatgtctgcggagtcagcatgtacgccagcgtcctgcttatcacggccatgagtctagaccgctcactggcggtggcccgcccctttgtgtcccagaagctacgcaccaaggcgatggcccggcgggtgctggcaggcatctgggtgttgtcctttctgctggccacacccgtcctcgcgtaccgcacagtagtgccctggaaaacgaacatgagcctgtgcttcccgcggtaccccagcgaagggcaccgggccttccatctaatcttcgaggctgtcacgggcttcctgctgcccttcctggctgtggtggccagctactcggacatagggcgtcggctacaggcccggcgcttccgccgcagccgccgcaccggccgcctggtggtgctcatcatcctgaccttcgccgccttctggctgccctaccacgtggtgaacctggctgaggcgggccgcgcgctggccggccaggccgccgggttagggctcgtggggaagcggctgagcctggcccgcaacgtgctcatcgtactcgccttcctgagcagcagcgtgaaccccgtgctgtacgcgtgcgccggcggcggcctcgtgcgctcggcgggcgtgggcttcgtcgccaagctgctggagggcacgggctccgaggcgtccagcacgcgccgcgggggcagcctgggccagaccgctaggagcggccccgccgctctggagcccggcccttccgagagcctcactgcctccagccctctcaagttaaacgaactgaactaggcctggtggaaggaggcgcactttcctcctggcagaatgctagctctgagccagttcagtacctggaggaggagcaggggcgtggagggcgtggagggcgtgggagcgtgggaggcgggagtggagtggaagaagagggagagatggagcaaagtgagggccgagtgagagcgtgctccagcctggctcccacaggcagctttaaccattaaaactgaagtctgaaatttggtcaaaaaaaaaaaaa

SEQ ID NO: 209 - DNA, 3002 bp, Homo sapiens
gccattctctcacatcccgtgcggtcaggaagcccttcctgaactctgacttcagttcttgctgcggtttctgcccatttttttcatatcctctgacagctgcgaggtcatctctgctctggcttttctccaagcagaacaagtgggggctctggaaaggttaagggacctcagtggccaccattatactttgcatctttcctgagaagtgagagttgaaagggaagcaggaaggcccatggtcagattgaaggaaggactttttagtttcttttttttttttttgaaatggagtctcgctctgtcattcaggctggagtgcagtggtgcgatctcagctcactgcagcctccacttcctgggttcacatgattctcctgcctcagcctcccaagtagctgagactacaggcacatgccactacacccagctaacttttgtatttttagtagagacggggtttcaccatgttggccaggctggtctcaaactgctaacatcaagtgatctgctcccctcagcctcccaaagtgctgggattaccggtatgaaccaccacaacctgccaggaatttttagtttttagcttttgcaggagacttcaaggaaaggagacattcctctgtccaggaaacgggtaaggggaccatttctgcattgctggtttcccctcttggcagggtgggcatgaggcatcactgttcctgctccctcactcctgctcctcatgctcagcctgccagctcggcctcaactttgtgtgtctaaagtggaactgaatagtagctgtgagaagataggaaagaggtagtgccaatctccttgcccagatcataaatccagactcagcagggtaaccacatgggcaagcacaaggtaggtgcttggggaaaggggaagtaattggcattctgtgtgataccaaggagaccatttggattttggcttctaccaaagagaatggagaattggttgacctaaatggaaccagtccctttaagtaaggggaggaaagggggtgctggaagatggccctcttcccaccacctagatcatagcttgaactgaagccaaggacagagtgctgcccccttcggcatttactgatgtgccctctttaaatcatgatgttatctaacccaaacccagacccaggacctagtcacagctccaacctacacttcctattaatcttaaaacaaagcgaaacaaacacaaaaagatatcagcattgtagcctccaatctgagcccatttcccttctctggctaccatacctccttctcctatatgataccattcactactttgttcaattatccagtctagacctgcatcttgaggccacacccagccttctcactccccacacccctctttcctctctcactgctccttcctggtctcttctcatctggccccacctctaaggagtcctcctgccttctgggttgccctggaaaacagactatcccccctcctagtgaagggagtgggtaggggtttcagccccaccctcaggaagatgcgtcttccctgtcctctgctctgtggtacttcctctctggctgatttagcaaacagcacctagacctggggccaggcctttggcagtgggacagatccagggataggctacaccaccctgccctgaccctgggattggcatcagcttccaaccagttcctgccaaagcttgtaagtcctcccgacggccatgaacactacatcttctgcagcacccccctcactaggtgtagagttcatctctctgctggctatcatcctgctgtcagtggcgctggctgtggggcttcccggcaacagctttgtggtgtggagtatcctgaaaaggatgcagaagcgctctgtcactgccctgatggtgctgaacctggccctggccgacctggccgtattgctcactgctccctttttccttcacttcctggcccaaggcacctggagttttggactggctggttgccgcctgtgtcactatgtctgcggagtcagcatgtacgccagcgtcctgcttatcacggccatgagtctagaccgctcactggcggtggcccgcccctttgtgtcccagaagctacgcaccaaggcgatggcccggcgggtgctggcaggcatctgggtgttgtcctttctgctggccacacccgtcctcgcgtaccgcacagtagtgccctggaaaacgaacatgagcctgtgcttcccgcggtaccccagcgaagggcaccgggccttccatctaatcttcgaggctgtcacgggcttcctgctgcccttcctggctgtggtggccagctactcggacatagggcgtcggctacaggcccggcgcttccgccgcagccgccgcaccggccgcctggtggtgctcatcatcctgaccttcgccgccttctggctgccctaccacgtggtgaacctggctgaggcgggccgcgcgctggccggccaggccgccgggttagggctcgtggggaagcggctgagcctggcccgcaacgtgctcatcgcactcgccttcctgagcagcagcgtgaaccccgtgctgtacgcgtgcgccggcggcggcctgctgcgctcggcgggcgtgggcttcgtcgccaagctgctggagggcacgggttccgaggcgtccagcacgcgccgcgggggcagcctgggccagaccgctaggagcggccccgccgctctggagcccggcccttccgagagcctcactgcctccagccctctcaagttaaacgaactgaactaggcctggtggaaggaggcgcactttcctcctggcagaatgctagctctgagccagttcagtacctggaggaggagcaggggcgtggagggcgtggagggcgtgggagcgtgggaggcgggagtggagtggaagaagagggagagatggagcaaagtgagggccgagtgagagcgtgctccagcctggctcccacaggcagctttaaccattaaaactgaagtctgaa

SEQ ID NO: 210 - DNA, 802 bp, Homo sapiens
aacaccatgaatctactcctgatccttacctttgttgcagctgctgttgctgccccctttgatgatgatgacaagatcgttgggggctacatctgtgaggagaattctgtcccctaccaggtgtccttgaattctggctaccacttctgcggtggctccctcatcagcgaacagtgggtggtgtcagcaggtcactgctacaagtcccgcatccaggtgagactgggagagcacaacatcgaagtcctggaggggaatgaacagttcatcaatgcggccaagatcatccgccaccccaaatacaacagccggactctggacaatgacatcctgctgatcaagctctcctcacctgccgtcatcaattcccgcgtgtccgccatctctctgcccactgcccctccagctgctggcaccgagtccctcatctccggctggggcaacactctgagttctggtgccgactacccagacgagctgcagtgcctggatgctcctgtgctgagccaggctgagtgtgaagcctcctaccctggaaagattaccaacaacatgttctgtgtgggcttcctcgagggaggcaaggattcctgccagggtgattctggtggccctgtggtctccaatggagagctccaaggaattgtctcctggggctatggctgtgcccagaagaacaggcctggagtctacaccaaggtctacaactatgtggactggattaaggacaccatagctgccaacagctaaagcccccagtccctctgcagtctctataccaataaagtgaccctgctctcac

SEQ ID NO: 211 - DNA, 1642 bp, Homo sapiens
ccagatctcagaggagcctggctaagcaaaaccctgcagaacggctgcctaatttacagcaaccatgagtacaaatggtgatgatcatcaggtcaaggatagtctggagcaattgagatgtcactttacatgggagttatccattgatgacgatgaaatgcctgatttagaaaacagagtcttggatcagattgaattcctagacaccaaatacagtgtgggaatacacaacctactagcctatgtgaaacacctgaaaggccagaatgaggaagccctgaagagcttaaaagaagctgaaaacttaatgcaggaagaacatgacaaccaagcaaatgtgaggagtctggtgacctggggcaactttgcctggatgtattaccacatgggcagactggcagaagcccagacttacctggacaaggtggagaacatttgcaagaagctttcaaatcccttccgctatagaatggagtgtccagaaatagactgtgaggaaggatgggccttgctgaagtgtggaggaaagaattatgaacgggccaaggcctgctttgaaaaggtgcttgaagtggaccctgaaaaccctgaatccagcgctgggtatgcgatctctgcctatcgcctggatggctttaaattagccacaaaaaatcacaagccattttctttgcttcccctaaggcaggctgtccgcttaaatccagacaatggatatattaaggttctccttgccctgaagcttcaggatgaaggacaggaagctgaaggagaaaagtacattgaagaagctctagccaacatgtcctcacagacctatgtctttcgatatgcagccaagttttaccgaagaaaaggctctgtggataaagctcttgagttattaaaaaaggccttgcaggaaacacccacttctgtcttactgcatcaccagatagggctttgctacaaggcacaaatgatccaaatcaaggaggctacaaaagggcagcctagagggcagaacagagaaaagctagacaaaatgataagatcagccatatttcattttgaatctgcagtggaaaaaaagcccacatttgaggtggctcatctagacctggcaagaatgtatatagaagcaggcaatcacagaaaagctgaagagaattttcaaaaattgttatgcatgaaaccagtggtagaagaaacaatgcaagacatacatttctactatggtcggtttcaggaatttcaaaagaaatctgacgtcaatgcaattatccattatttaaaagctataaaaatagaacaggcatcattaacaagggataaaagtatcaattctttgaagaaattggttttaaggaaacttcggagaaaggcattagatctggaaagcttgagcctccttgggttcgtctataaattggaaggaaatatgaatgaagccctggagtactatgagcgggccctgagactggctgctgactttgagaactctgtgagacaaggtccttaggcacccagatatcagccactttcacatttcatttcattttatgctaacatttactaatcatcttttctgcttactgttttcagaaacattataattcactgtaatgatgtaattcttgaataataaatctgacaaaatatt

SEQ ID NO: 212 - DNA, 549 bp, Homo sapiens
aagagacatgagacaaccactgagaaccagccacccggagctcagtttctgctacagagcacctcctcttcaacgaatcactggataccattggagagcaagtcactgttgttgaagcagcagagctggaggtgctgtcaagagtctcagcagactcattggccagatgcaccgaactcaatgaggcacttagagatgagaaacgatctgtactgggatttcccagcagaagagactttggtttttgtcatcctgaagttgccactccaccaccagttttatagagggatattcgcttttcactggtagtttattcaggtagctataggtcttgtctttttggatagggcagttaattccactcttacaaccatcaggctcaggaatgggaaagggaactgggacgcccatcaggatgccatgcaccacggccttgctgcttttagactgaatattgctggtgaaggtgacattgacgctgtaagactgtcctttgctcagctggcagggtttggtggggcatggggctcacattcacttcctttataa

SEQ ID NO: 213 - DNA, 499 bp, Homo sapiens
gtcttaagttgtggtctgacacacactgctgtggttcccctggatttagtgaaatgccgtatgcaggtggacccccaaaagtacaagggcatatttaacggattctcagttacacttaaagaggatggtgttcgtggtttggctaaaggatgggctccgactttccttggctactccatgcagggactctgcaagtttggcttttatgaagtctttaaagtcttgtatagcaatatgcttggagaggagaatacttatctctggcgcacatcactatatttggctgcctctgccagtgctgaattctttgctgacattgccctggctcctatggaagctgctaaggttcgaattcaaacccagccaggttatgccaacactttgagggatgcagctcccaaaatgtataaggaagaaggcctaaaagcattctacaagggggttgctcctctctggatgagacagataacatacaccatgatgaagttcgcctgctttg

SEQ ID NO: 214 - DNA, 197 bp, Homo sapiens
accgggacctggctgcccgcaatgtgctggtgactgaggacaatgtgatgaagattgctgactttgggctggcccgcggcgtccaccacattgactactataagaaaaccagcaacggccgcctgcctgtgaagtggatggcgcccgaggccttgtttgaccgggtgtacacacaccagagtgacgtgtggtccttt

SEQ ID NO: 215 - DNA, 386 bp, Homo sapiens
  modified_base (264): a, t, c, g, other or unknown
  modified_base (345): a, t, c, g, other or unknown
ataagtaaaagatctcctaaatggaagatgcacagagtagatttacaatgctccaattcctctcttacagcaatattgccttcacagttataaactgtattcaaatagtaaaggtcaccctctcgcttccctggctggccccagggctaccactggtattcctgagcctctcccagctccacttctaatgctagagaatgataactaagatttctgtgcatttgaaggttgttggaaagttacaggttcattttagaaagaaangctgttcttgacagcactcctgagccatcatacctctttcccatataaactattttcacagatctcaactaaaaccccttnactttcacaaaatggattgtggttggtgctggaaatggtgc

SEQ ID NO: 216 - DNA, 475 bp, Homo sapiens
  modified_base (250): a, t, c, g, other or unknown
gactacaacgtggcccttcagagatcgcggatggtcgcacgatcctccgacacagctgggccttcatccgtacagcagccacatgggcatcccaccagcagcaggcctgtgaacaaacctcagtggcataaaccgaacgagtctgacccgcgcctcgccccttatcagtcccaagggttttccaccgaggaggatgaagatgaacaagtttctgctgtttgaggcacagacttttctggaagcagagcgngccacctgaaaggagagcacaagaagacgtcctgagcattggagccttggaactcacattctgaggacggtggaccagtttgcctccttccctgccttaaaagcagcatggggcttcttctccccttcttcctttcccctttgcatgtgaaatactgtgaagaaattgccctggcacttttcagactttgttgcttgaaatgcacagtgcagcaatcttcgagct

SEQ ID NO: 217 - DNA, 1025 bp, Homo sapiens
gtcccgagcgcgagcggagacgatgcagcggagactggttcagcagtggagcgtcgcggtgttcctgctgagctacgcggtgccctcctgcgggcgctcggtggagggtctcagccgccgcctcaaaagagctgtgtctgaacatcagctcctccatgacaaggggaagtccatccaagatttacggcgacgattcttccttcaccatctgatcgcagaaatccacacagctgaaatcagagctacctcggaggtgtcccctaactccaagccctctcccaacacaaagaaccaccccgtccgatttgggtctgatgatgagggcagatacctaactcaggaaactaacaaggtggagacgtacaaagagcagccgctcaagacacctgggaagaaaaagaaaggcaagcccgggaaacgcaaggagcaggaaaagaaaaaacggcgaactcgctctgcctggttagactctggagtgactgggagtgggctagaaggggaccacctgtctgacacctccacaacgtcgctggagctcgattcacggaggcattgaaattttcagcagagaccttccaaggacatattgcaggattctgtaatagtgaacatatggaaagtattagaaatatttattgtctgtaaatactgtaaatgcattggaataaaactgtctcccccattgctctatgaaactgcacattggtcattgtgaatatttttttttttgccaaggctaatccaattattattatcacatttaccataatttattttgtccattgatgtatttattttgtaaatgtatcttggtgctgctgaatttctatattttttgtaacataatgcactttagatatacatatcaagtatgttgataaatgacacaatgaagtgtctctattttgtggttgattttaatgaatgcctaaatataattatccaaattgattttccttcgtgcatgtaaaaataacagtattttaaatttgtaaagaatgtctaataaaatataatctaattac

SEQ ID NO: 218 - DNA, 2060 bp, Homo sapiens
tgttcccagcactcaagccttgccaccgccgagccgggcttcctgggtgtttcaggcaaggaagtctaggtccctggggggtgacccccaaggaaaaggcagcctccctgcgcacccggttgcccggagccctctccagggccggctgggctgggggttgccctggccagcaggggcccgggggcgatgccacccggtgccgactgaggccaccgcaccatggcccgctcgctgacctggcgctgctgcccctggtgcctgacggaggatgagaaggccgccgcccgggtggaccaggagatcaacaggatcctcttggagcagaagaagcaggaccgcggggagctgaagctgctgcttttgggcccaggcgagagcgggaagagcaccttcatcaagcagatgcggatcatccacggcgccggctactcggaggaggagcgcaagggcttccggcccctggtctaccagaacatcttcgtgtccatgcgggccatgatcgaggccatggagcggctgcagattccattcagcaggcccgagagcaagcaccacgctagcctggtcatgagccaggacccctataaagtgaccacgtttgagaagcgctacgctgcggccatgcagtggctgtggagggatgccggcatccgggcctgctatgagcgtcggcgggaattccacctgctcgattcagccgtgtactacctgtcccacctggagcgcatcaccgaggagggctacgtccccacagctcaggacgtgctccgcagccgcatgcccaccactggcatcaacgagtactgcttctccgtgcagaaaaccaacctgcggatcgtggacgtcgggggccagaagtcagagcgtaagaaatggatccattgtttcgagaacgtgatcgccctcatctacctggcctcactgagtgaatacgaccagtgcctggaggagaacaaccaggagaaccgcatgaaggagagcctcgcattgtttgggactatcctggaactaccctggttcaaaagcacatccgtcatcctctttctcaacaaaaccgacatcctggaggagaaaatccccacctcccacctggctacctatttccccagtttccagggccctaagcaggatgctgaggcagccaagaggttcatcctggacatgtacacgaggatgtacaccgggtgcgtggacggccccgagggcagcaagaagggcgcacgatcccgacgccttttcagccactacacatgtgccacagacacacagaacatccgcaaggtcttcaaggacgtgcgggactcggtgctcgcccgctacctggacgagatcaacctgctgtgacccaggccccacctggggcaggcggcaccggcgggcgggtgggaggtgggagtggctgcagggaccctagtgtcctggtctatctctccagcctcggcccacacgcaagggagtcgggggacggcccgctgctggccgctctcttctctgcctctcaccaggacagccgccccccagggtactcctgcccttgcttgactcagtttccctcctttgaaagggaaggagcaaaacggccatttgggatgccagggtggatgaaaaggtgaagaaatcaggggattgagacttgggtgggtgggcatctctcaggagccccatctccgggcgtgtcacctcctgggcagggttctgggaccctctgtgggtgacgcacaccctgggatggggctagtagagccttcaggcgccttcgggcgtggactctggcgcactctagtggacaggagaaggaacgccttccaggaacctgtggactaggggtgcagggacttccctttgcaaggggtaacagaccgctggaaaacactgtcactttcagagctcggtggctcacagcgtgtcctgccccggtttgcggacgagagaaatcgcggcccacaagcatcccccatcccttgcaggctgggggctgggcatgctgcatcttaaccttttgtatttattccctcaccttctgcagggctccgtgcgggctgaaattaaagatttcttag

SEQ ID NO: 219 - DNA, 470 bp, Homo sapiens
  modified_base (383): a, t, c, g, other or unknown
  modified_base (410): a, t, c, g, other or unknown
  modified_base (438): a, t, c, g, other or unknown
  modified_base (468): a, t, c, g, other or unknown
ggatgggagatactgttgtggtcacctctggaaaatacattctgctactcttaaaaactagtgacgctcatacaaatcaacagaaagagcttctgaaggaagactttaaagctgcttctgccacgtgctgctgggtctcagtcctccacttcccgtgtcctctggaagttgtcaggagcaatgttgcgcttgtacgtgttggtaatgggagtttctgccttcacccttcagcctgcggcacacacaggggctgccagaagctgccggtttcgtgggaggcattacaagcgggagttcaggctggaaggggagcctgtagccctgaggtgcccccaggtgccctactggttgtggggcctctgttcagcccccgcatcaacctnaacatgggcattaaaaattgactcttnttagggacggtcccagggagtaagaagnagacacggatgtgggtcccagggacggttncg

SEQ ID NO: 220 - DNA, 247 bp, Homo sapiens
gccgcgctaccagattgcaccggggctgatttgggggctgggaatttgccattctgctgtacagacactgatttttttttcttctttttaaaaagcaagattttaggtgatgggcaagtcagaaagtcagatggatataactgatatcaacactccaaagccaaagaagaaacagcgatggactccactggagatcagcctctcggtccttgtcctgctcctcaccatcatagctgtgacaatgatc

SEQ ID NO: 221 - DNA, 374 bp, Homo sapiens
  modified_base (14): a, t, c, g, other or unknown
  modified_base (17): a, t, c, g, other or unknown
  modified_base (107): a, t, c, g, other or unknown
  modified_base (114): a, t, c, g, other or unknown
  modified_base (116): a, t, c, g, other or unknown
atggccgcggcacnctnctttctaagtcggcttcgagcacccttcagttccatggccaagagcccactcgagggcgtttcctcctccagaggcctgcacgcggggcnggcccananggcttctccatcgaaggcaacattggcctgcactgcccaaagtcttggaaacttgctggatatgatgtaccgggagccagcacgatggtcctacacattccagacattttcctttttgagccgcctgaaagtacagctgggagcccttccctgaggaaactctttacagggccagggaagccagttacagatcttttgaggaggtctgtgtaacagtggacagggttccatttttgagggtttggatggaacatttcc

SEQ ID NO: 222 - DNA, 263 bp, Homo sapiens
gctgggagaagcaggaatctgcgctcgggttccgcagatgcagaggttgaggtggctgcgggactggaactcatcgggcagaggtctcacagcagccaaggaacctggggcccgctcctcccccctccaggccatgaggattctgcagttaatactgcttgctctggcaacagggcttgtagggggagagaccaggatcatcaaggggttcgagtgcaagcctcactcccagccctggcaggcagccctgttcgagaagacgc

SEQ ID NO: 223 - DNA, 429 bp, Homo sapiens
  modified_base (151): a, t, c, g, other or unknown
  modified_base (260): a, t, c, g, other or unknown
  modified_base (323): a, t, c, g, other or unknown
  modified_base (349): a, t, c, g, other or unknown
  modified_base (391): a, t, c, g, other or unknown
  modified_base (398): a, t, c, g, other or unknown
  modified_base (414): a, t, c, g, other or unknown
  modified_base (423): a, t, c, g, other or unknown
agggcgaggtggtctttgccttcaccaacttctcctcctctcatgaccacttcagagtcctggcactggctaggggtgtcaatgcatcagccgtagtgaacgtcactgtgagggctctgctgcatgtgtgggcaggtgggccatggccagnggtgccaccctgcgcctggaccccaccgtcctagatgctggcgagctggccaaccgcacaggcagtgtgccgcgcttccgcctcctggagggaccccggcatggcccgntggtccgcgtgccccgagccaggacggagcccgggggaagccagctggtggagcagttcactnagcaggaccttgaggacgggaggctngggctggaggtgggcaggccagaggggagggcccccggccgncaggtgnacaattctcaattttngagcttttngggcac

SEQ ID NO: 224 - DNA, 533 bp, Homo sapiens
tatgtcactattttattgatgatgtgttttatagaatcacaaaatttagaaacataagaaggatttaggtatcacctaaattcaaagaaatgtgtgtttctaggttgctaaattcaaagaaaaagtatgatttggtttggttcatttaaaacaggtcacaaacagaattatatttcaaatttagaagatacggtattaagtgattcatcttattttggacatttttcctcaaggagaatttttctggaagaaaaagtacatttatatgtgggcttattaagagaaagagagaaaggcatgctattttaatcattaaattcttgatgatgacgatcatcatcaagatgagaaagaaaagaaatatgagccaagagaatctgttgttgccagcaatcagtttaccagaacatctgcaggtgaacattttccaaatggagtgacagactaattgcatctacggggatgagaatctgccatagagaggatgctgtgggcttattttgcttatgtagataggaagggtgatacatgga

SEQ ID NO: 225 - DNA, 469 bp, Homo sapiens
aaaaaaaaaacatgaagggagacatgactttattagaaaaataaaaaacaactgaggtgatgggttggtcttcagcggatccttggtggatgaggctgcttttggctgcactggccttctcccgctcccgccgccgcgcagggtccaactcaaaacagcgccatagcctcagggtctcatctgctgctgcggatgccactgtggccccatctgggctcatggtcagactcaggacccgggatgtgtgacctttgagttcagccaccttggccatggttgggtacttccaaataactagctgattctgtgcaaagccatggcctgagatgagctccttgtaagggggagaccagaggatggagcacacctgggaatgggcatccacggcactcagacaggccccagagcaaaaattccagatgcgaatgtgtcgatcactggtgcaccctcctgtggcaaggacatttga

SEQ ID NO: 226 - DNA, 352 bp, Homo sapiens
ttttcattttttgagtaatttatttaaatttgtgaatctagaaaatgtgtgttatatatttatatacagggaataacaaaagttaagtgtttaattggaaagaaaactgtgactgataatatgttgtaattaccattttataatattactttccattgcaatgacttaaaatgaagaaataagaataggaataattatgctaacaaattcactttgttttctgtgccactaaatttctttaggatcaagaactctttcatattcagacattaaacaatattcaaataattttataaaatagacatacaagtttactcatattaaaaaaacaagttgattttcatttcctgta

SEQ ID NO: 227 - DNA, 1342 bp, Homo sapiens
cggctgtaatctcagaggcttgtttgctgagggtgcctgcgcacgtgcgacggctgctggttttgaaacatgaatctttcgctcgtcctggctgccttttgcttgggaatagcctccgctgttccaaaatttgaccaaaatttggatacaaagtggtaccagtggaaggcaacacacagaagattatatggcgcgaatgaagaaggatggaggagagcagtgtgggaaaagaatatgaaaatgattgaactgcacaatggggaatacagccaagggaaacatggcttcacaatggccatgaatgcttttcctgacatgaccaatgaagaattcaggcagatgatgggttgctttcgaaaccagaaattcaggaaggggaaagtgttccgtgagcctctgtttcttgatcttcccaaatctgtggattggagaaagaaaggctacgtgacgccagtgaagaatcagaaacagtgtggttcttgttgggcttttagtgcgactggtgctcttgaaggacagatgttccggaaaactgggaaacttgtctcactgagcgagcagaatctggtggactgttcgcgtcctcaaggcaatcagggctgcaatggtggcttcatggctagggccttccagtatgtcaaggagaacggaggcctggactctgaggaatcctatccatatgtagcagtggatgaaatctgtaagtacagacctgagaattctgttgctaatgacactggcttcacagtggtcgcacctggaaaggagaaggccctgatgaaagcagtcgcaactgtggggcccatctccgttgctatggatgcaggccattcgtccttccagttctacaaatcaggcatttattttgaaccagactgcagcagcaaaaacctggatcatggtgttctggtggttggctacggctttgaaggagcaaattcgaataacagcaagtattggctcgtcaaaaacagctggggtccagaatggggctcgaatggctatgtaaaaatagccaaagacaagaacaaccactgtggaatcgccacagcagccagctaccccaatgtgtgagctgatggatggtgaggaggaaggacttaaggacagcatgtctggggaaattttatcttgaaactgaccaaacgcttattgtgtaagataaaccagttgaatcattgaggatccaagttgagattttaattctgtgacatttttacaagggtaaaatgttaccactactttaattattgttatacacagctttatgatatcaaagactcattgcttaattctaagacttttgaattttcattttttaaaaagatgtacaaaacagttt

SEQ ID NO: 228 - DNA, 582 bp, Homo sapiens
  modified_base (504): a, t, c, g, other or unknown
  modified_base (535): a, t, c, g, other or unknown
  modified_base (551): a, t, c, g, other or unknown
  modified_base (563): a, t, c, g, other or unknown
tggatttggatgctgcaaaaacgagactaaaaaaggcaaaagctgcagaaactagaaattcatctgaacaggaattaagaataactcaaagtgaatttgatcgtcaagcagagattaccagacttctgctagagggaatcagcagtacacatgcccatcaccttcgctgtctgaatgactttgtagaagcccagatgacttactatgcacagtgttaccagtatatgttggacctccagaaacaactgggaagttttccatccaattatcttagtaacaacaatcagacttctgtgacacctgtaccatcagttttaccaaatgcgattggttcttctgccatggctttcaacaagtggcctagtaatcacctctccttccaacctcagtgaccttaagggagtgtagtgggcagcaggaaagggccggggttctcttatggatttatggatggcagcaaacagtactggaattattcacttctgggcagttgagggtgatcantgtgttcagtgttgttgggatgggattcagnttggctaattgggggnaagggggaaccnggagggcaaggtgccatta

SEQ ID NO: 229 - DNA, 246 bp, Homo sapiens
gttccgcagatgcagaggttgaggtggctgcgggactggaagtcatcgggcagaggtctcacagcagccaaggaacctggggcccgctcctcccccctccaggccatgaggattctgcagttaatcctgcttgctctggcaacagggcttgtagggggagagaccaggatcatcaaggggttcgagtgcaagcctcactcccagccctggcaggcagccctgttcgagaagacgcggctactctgt

SEQ ID NO: 230 - DNA, 2720 bp, Homo sapiens
atgcggctggcgctgctctgggccctggggctcctgggcgcgggcagccctctgccttcctggccgctcccaaatataggtggcactgaggagcagcaggcagagtcagagaaggccccgagggagcccttggagccccaggtccttcaggacgatctcccaattagcctcaaaaaggtgcttcagaccagtctgcctgagcccctgaggatcaagttggagctggacggtgacagtcatatcctggagctgctacagaatagggagttggtcccaggccgcccaaccctggtgtggtaccagcccgatggcactcgggtggtcagtgagggacacactttggagaactgctgctaccagggaagagtgcggggatatgcaggctcctgggtgtccatctgcacctgctctgggctcagaggcttggtggtcctgaccccagagagaagctataccctggagcaggggcctggggaccttcagggtcctcccattatttcgcgaatccaagatctccacctgccaggccacacctgtgccctgagctggcgggaatctgtacacactcagacgccaccagagcaccccctgggacagcgccacattcgccggaggcgggatgtggtaacagagaccaagactgtggagttggtgattgtggctgatcactcggaggcccagaaataccgggacttccagcacctgctaaaccgcacactggaagtggccctcttgctggacacattcttccggcccctgaatgtacgagtggcactagtgggcctggaggcctggacccagcgtgacctggtggagatcagcccaaacccagctgtcaccctcgaaaacttcctccactggcgcagggcacatttgctgcctcgattgccccatgacagtgcccagctggtgactggtacttcattctctgggcctacggtgggcatggccattcagaactccatctgttctcctgacttctcaggaggtgtgaacatggaccactccaccagcatcctgggagtcgcctcctccatagcccatgagttgggccacagcctgggcctggaccatgatttgcctgggaatagctgcccctgtccaggtccagccccagccaagacctgcatcatggaggcctccacagacttcctaccaggcctgaacttcagcaactgcagccgacgggccctggagaaagccctcctggatggaatgggcagctgcctcttcgaacggctgcctagcctaccccctatggctgctttctgcggaaatatgtttgtggagccgggcgagcagtgtgactgtggcttcctggatgactgcgtcgatccctgctgtgattctttgacctgccagctgaggccaggtgcacagtgtgcatctgacggaccctgttgtcaaaattgccagctgcgcccgtctggctggcagtgtcgtcctaccagaggggattgtgacttgcctgaattctgcccaggagacagctcccagtgtccccctgatgtcagcctaggggatggcgagccctgcgctggcgggcaagctgtgtgcatgcacgggcgttgtgcctcctatgcccagcagtgccagtcactttggggacctggagcccagcccgctgcgccactttgcctccagaccgctaatactcggggaaatgcttttgggagctgtgggcgcaaccccagtggcagttatgtgtcctgcacccctagagatgccatttgtgggcagctccagtgccagacaggtaggacccagcctctgctgggctccatccgggatctactctgggagacaatagatgtgaatgggactgagctgaactgcagctgggtgcacctggacctgggcagtgatgtggcccagcccctcctgactctgcctggcacagcctgtggccctggcctggtgtgtatagaccatcgatgccagcgtgtggatctcctgggggcacaggaatgtcgaagcaaatgccatggacatggggtctgtgacagcaacaggcactgctactgtgaggagggctgggcaccccctgactgcaccactcagctcaaagcaaccagctccctgaccacagggctgctcctcagcctcctggtcttattggtcctggtgatgcttggtgccagctactggtaccgtgcccgcctgvaccagcgactctgccagctcaagggacccacctgccagtacagggcagcccaatctggtccctctgaacggccaggacctccgcagagggccctgctggcacgaggcactaagtctcaggggccagccaagcccccacccccaaggaagccactgcctgccgacccccagggccggtgcccatcgggtgacctgcccggcccagggcctggaatcccgcccctagtggtaccctccagaccagcgccaccgcctccgacagtgtcctcgctctacctctgacctctccggaggttccgctgcctccaagccggacttagggcttcaagaggcgggcgtgccctctggagtcccctaccatgactgaaggcgccagagactggcggtgtcttaagactccgggcaccgccacgcgctgtcaagcaacactctgcggacctgccggcgtagttgcagcgggggcttggggaggggctgggggttggacgggattgaggaaggtccgcacagcctgtctctgctcagttgcaataaacgtgacatcttgggagcgttaa

SEQ ID NO: 231 - DNA, 410 bp, Homo sapiens
aagaagtccagtgtgtccagttaaaacagaaataaattaaactcttcatcaacaaagacctgtttttgtgactgccttgagttttatcagaattattggcctagtaatccttcagaaacaccgtaattctaaataaacctcttcccatacacctttcccccataagatgtgtcttcaacactataaagcatttgtattgtgatttgattaagtatatatttggttgttctcaatgaagagcaaatttaaatattatgtgcatttgtaaatacagtagctataaaattttccatacttctaatggcagaatacaggaggccatattaaataatactgatgaaaggcaggacactgcattgtaaataggattttctaggctcggtaggcagaaagaattatttttctttgaa

SEQ ID NO: 232 - DNA, 475 bp, Homo sapiens
  modified_base (1): a, t, c, g, other or unknown
  modified_base (18): a, t, c, g, other or unknown
  modified_base (31): a, t, c, g, other or unknown
  modified_base (296): a, t, c, g, other or unknown
  modified_base (414): a, t, c, g, other or unknown
  modified_base (474): a, t, c, g, other or unknown
nttatactcacccacaantttgtgacccgantgtaatgaaagcctctgcaaattgaaaacatcattgatcaagaggtgcagacattatctggtggtgaactacagcgagtagctttagccctttgcttgggcaaacctgctgatgtctatttaattgatgaaccatctgcatatttggattctgagcaaagactgatggcagctcgagttgtcaaacgtttcatactccatgcaaaaaagacagcctttgttgtggaacatgacttcatcatggccacctatctagcggatcggtncatcgtttttgatggtgttccatctaaggaacacagttgcaaacagtcctcaaacccttttgggctgggcttgaataaatttttggtcttcagcttggaaatttacatttcaggaggngttccaaaccaactattgggccacggattaaacaaacttatttcaatttagggtgtaggnc

SEQ ID NO: 233 - DNA, 279 bp, Homo sapiens
taatgtttatgcaaagtattgattctgttgttgaattttgtaacgaaaaaacccataaatcaagaagctccaagcctacaaaacataaagtgcaattttagaagtacatgggaggtgattagcaattctgaggattttaaaaacaccatacccatggtgacaccacctcctccacctgtcttctcattgctgaagatcagtcaaagaattgtgtgcttagttcttgataagtctggaagcatggggggtaaggaccgcctaaatcgaatgaatcaagca

SEQ ID NO: 234 - DNA, 267 bp, Homo sapiens
gggggctgggaatttgccattctgctgtacagacactgatttttttttcttctttttaaaaagcaagattttaggtgatgggcaagtcagaaagtcagatggatataactgatatcaacactccaaagccaaagaagaaacagcgatggactccactggagatcagcctctcggtccttgtcctgctcctcaccatcatagctgtgacaatgatcgcactctatgcaacctacgatgatggtaattgcaagtcatcagactgcataa

SEQ ID NO: 235 - DNA, 244 bp, Homo sapiens
gaaacggatgaccagggcaaatacatgaccctagttttgtcccggatcgacctagtgttcattgttctgttcactggagaatttgtgctgaagctcgtctccctcagacactactacttcactataggctggaacatctttgactttgtggtggggattctctccattgtaggtatgtttctggctgagatgatagaaaagtattttgtgtcccctaccttggtccgagtgatccgtcttgcca

SEQ ID NO: 236 - DNA, 180 bp, Homo sapiens
  modified_base (12): a, t, c, g, other or unknown
  modified_base (39): a, t, c, g, other or unknown
  modified_base (42): a, t, c, g, other or unknown
  modified_base (45): a, t, c, g, other or unknown
  modified_base (48): a, t, c, g, other or unknown
  modified_base (70): a, t, c, g, other or unknown
  modified_base (96): a, t, c, g, other or unknown
  modified_base (111): a, t, c, g, other or unknown
  modified_base (117): a, t, c, g, other or unknown
  modified_base (131): a, t, c, g, other or unknown
cagcgatgtctncaccaccggtgctgcaacccctgctgntgntgntgnctctgctgaatgtggagccttncggggccaaaatgatccgcatccctnttcatcgagtccaanctggangcaggatcctgaanctactgaggggatggagagaaccagcagagctccccaagttgggggccc

SEQ ID NO: 237 - DNA, 399 bp, Homo sapiens
  modified_base (1)..(5): a, t, c, g, other or unknown
  modified_base (57): a, t, c, g, other or unknown
  modified_base (87): a, t, c, g, other or unknown
  modified_base (163): a, t, c, g, other or unknown
  modified_base (180): a, t, c, g, other or unknown
  modified_base (183): a, t, c, g, other or unknown
  modified_base (211): a, t, c, g, other or unknown
  modified_base (255): a, t, c, g, other or unknown
  modified_base (337): a, t, c, g, other or unknown
  modified_base (345): a, t, c, g, other or unknown
  modified_base (366): a, t, c, g, other or unknown
  modified_base (395): a, t, c, g, other or unknown
nnnnnagggaaaaaaaatggaaaatttattaattagacagtatgtgggcatcctgtnccacatgggaatgagaagatgctataggtnctctaagtattgcacagtctgaaaaaataacaaaaaaagggaaggggaggaaaaaaaaatcacatgatattggganccatctcacattatgantantctaccaagaaacatttaaaaaagaaanccctttgtttctacagtaggctttaagtttatagttcttgggantgactgtattccattgaaggacatctcaggtaacagggaaggctgttttaggcaatccccatgtggcaaatattaataaaanatatatanttttttgccaattcatctctngccttcaccccgggcaatcatgacatttncgag

SEQ ID NO: 238 - DNA, 1597 bp, Homo sapiens
cggcagagtcagtgtgcggtttgggagaaaatgtgtcggatattttggggcggtcacgtgggcgggcgggctccgagaggccccgggacagtcccagcctagagccgtgcccccccaggagccccccagtacggcgagccccggacattgcgacgctccatccaagagactgcccgacgccgggacctcggggctccgccgcctcccttccccctcccactccagcagctacggcccagttccctcaacctgacccagtatgtagaagccagtctctgcaggcggccagcggcggtggagacacagagcaccagctcagaggagatggtgccaagctcgccctcgccccctccgcctcctcgggtctacaagccatgcttcgtgtgcaatgacaagtcctctggctaccactatggggtcagctcttgtgaaggctgcaagggcttctttcgccgaagcatccagaagaacatggtgtacacgtgtcaccgcgacaaaaactgtatcatcaacaaggtgaccaggaatcgctgccagtactgccggctacagaagtgcttcgaagtgggcatgtccaaggaagctgtgcgaaatgaccggaacaagaagaagaaagaggtgaaggaagaagggtcacctgacagctatgagctgagccctcagttagaagagctcatcaccaaggtcagcaaagcccatcaggagactttcccctcgctctgccagctgggcaagtataccacgaactccagtgcagaccaccgcgtgcagctggatctggggctgtgggacaagttcagtgagctggctaccaagtgcatcatcaagatcgtggagtttgccaagcggttgcctggctttacagggctcagcattgctgaccagatcactctgctcaaagctgcctgcctagatatcctgatgctgcgtatctgcacaaggtacaccccagagcaggacaccatgaccttctccgacgggctgaccctgaaccggacccagatgcacaatgccggcttcgggcccctcacagaccttgtctttgcctttgctgggcagctcctgcccctggagatggatgacaccgagacagggctgctcagcgccatctgcctcatctgcggagaccgcatggacctggaggagcccgaaaaagtggacaagctgcaggagccactgctggaagccctgaggctgtacgcccggcgccggcggcccagccagccctacatgttcccaaggatgctaatgaaaatcaccgacctccggggcatcagcactaagggagctgaaagggccattactctgaagatggagattccaggcccgatgcctcccttaatccgagagatgctggagaaccctgaaatgtttgaggatgactcctcgcagcctggtccccaccccaatgcctctagcgaggatgaggttcctgggggccagggcaaagggggcctgaagtccccagcctgaccagggcccctgacctccccgctgtgggggttggggcttcaggcagcagactgaccatctcccagaccgccagtgactgggggaggacctgctctgccctctccccaaccccttccaatgagcg

SEQ ID NO: 239 - DNA, 769 bp, Homo sapiens
  modified_base (750): a, t, c, g, other or unknown
cgccatcccatctccaaaatcctcagtcctgtgatgacctttccctactttataggcctaagcatgctgagcgccatcagcaccgagcgctgcctgtccatcctgtggcccatctggtaccactgccgccgccccagatacctgtcatcggtcatgtgtgtcctgctctgggccctgtccctgctgcggagtatcctggagtggatgttctgtgacttcctgtttagtggtgctgattctgtttggtgtgaaacgtcagatttcattacaatcgcgtggctggtttttttatgtgtggttctctgtgggtccagcctggtcctactggtcaggattctctgtggatcccggaagatgccgctgaccaggctgtacgtgaccatcctcctcacagtgctggtcttcctcctctgtggcctgccctttggcattcagtgggccctgttttccaggatccacctggattggaaagtcttattttgtcatgtgcatctagtttccattttcctgtccgctcttaacagcagtgccaaccccatcatttacttcttcgtgggctcctttaggcagcgtcaaaataggcagaacctgaagctggttctccagagggctctgcaggacacgcctgaggtggatgaaggtggagggtggcttcctcaggaaaccctggagctgtcgggaagcagattggagcagtgaggaagaacctctgccctgtcagacaggactttgagagcaatgctgccctgncaccttgacaattatatgc

SEQ ID NO: 240 - DNA, 377 bp, Homo sapiens
  modified_base (113): a, t, c, g, other or unknown
gctggagcagctgctgggggcacgggaccgttggcggcgcgggccaggggagccagctgagcggcgtggggcggctccggtgtcggcgggtggcgcggcgcccccggaggcantgatcataacggggtttacgtactgccgagcgcggccaacggagacgtgaagcccgtggtgtccagcacgcctttggtggacttcttgatgcagctggaagattacacgcctacgatcccagatgcagtgactggttactacctgaaccgtgctggctttgaggcctcagacccacgcataattcggctcatctccttagctgcccagaaattcatctcagatattgccaatgatgccctacagcactgcaaaatggaagggca

SEQ ID NO: 241 - DNA, 553 bp, Homo sapiens
  modified_base (476): a, t, c, g, other or unknown
  modified_base (480): a, t, c, g, other or unknown
  modified_base (520): a, t, c, g, other or unknown
  modified_base (535): a, t, c, g, other or unknown
cccaccaggaccaaggccttgagagcagattggacctattgattatgtgtatataaaaaacaagacatcttttaaagcaaagctgggcaaattctctatggaaagggcgccactggcacttgattttgactttccaaagtgcagcaatgtgttccagaacagctcaaatcctaaaaggtgaagttcaagttctttggtggcccagttgtcaagccacttaaatagcaaatcctgatggcttgaggatttcatttctccagcccagagcatattagcataagaagagtacaagtaatcaagcattctacacggtgtccaggtgaaaaccatacaatcagcaatagtgtggtcaagtttcagccatgaatatgaactatacaagacatatttaaaagataactcaaagttgaattgcattacagtaactcaatggggtcttaaattttcttaatctttaagaaaatttataaagggcnaacnataataaaaatagtaataatatttgtttttaaaagtaggngtgaatgttaagagncataaagactgcttatag

SEQ ID NO: 242 - DNA, 387 bp, Homo sapiens
  modified_base (269): a, t, c, g, other or unknown
  modified_base (279): a, t, c, g, other or unknown
  modified_base (359): a, t, c, g, other or unknown
  modified_base (365): a, t, c, g, other or unknown
acaatttgaattatgagagttcactttcagacgaagcacctaacaggaaatctctcaaacacagaaatgctggtttagccacaagatcaaaggaaaagattgattttgtatgtccgtgcagtttttgagagtgcgtctacacattttcgttttcacagcaatctttgtgtttgaagggagttctgatgtggaaacagcttgcagggttaaacctggatggcgcccctgtgatcagacattgctctgttgtaataaaagtgtcctcagtnctctttcccnctgatcctcctgcctgtacttctcctcgagttgctgtttctcagaatctgcacagtaaaatgtgccaatctggggctttnccgaanccggttcaaactgactgaaatc

SEQ ID NO: 243 - DNA, 477 bp, Homo sapiens
  modified_base (467): a, t, c, g, other or unknown
tttttttcgcattcaacttaaatgcttttattgacaatgtcttggaacaataagcaaacaatgcttaaatttttcattcaaattcactttccacatgtcaaaagacctcaaggtagaaaaaaataaaataaaaatataaatatctgagaatccatcttaataaataaattaaaaacacaataaaacgttttcatggaaaactgttaatgtcagaacattcagaccacctcaacaatgcatgatcagtaacattacaatgaacattgatgttgaagaaaaactacagtacatggatatagctatttatttctatctaccagaaaataaagtcgtatcttttcttagtataatattgggtcatttctaatcagaacacactattgccaggaacacagtagttattgttaaaatcagccgcactagataccatttggaaatatccagcaccaggttaattcccataatgnaccccatagg

SEQ ID NO: 244 - DNA, 1931 bp, Homo sapiens
gaattcctgacacgctcctgggtcgtaggcacaggagtgggggccaaagcatggagaatcaagagaaggcgagtatcgcgggccacatgttcgacgtagtcgtgatcggaggtggcatttcaggactatctgctgccaaactcttgactgaatatggcgttagtgttttggttttagaagctcgggacagggttggaggaagaacatatactataaggaatgagcatgttgattacgtagatgttggtggagcttatgtgggaccaacccaaaacagaatcttacgcttgtctaaggagctgggcatagagacttacaaagtgaatgtcagtgagcgtctcgttcaatatgtcaaggggaaaacatatccatttcggggcgcctttccaccagtatggaatcccattgcatatttggattacaataatctgtggaggacaatagataacatggggaaggagattccaactgatgcaccctgggaggctcaacatgctgacaaatgggacaaaatgaccatgaaagagctcattgacaaaatctgctggacaaagactgctaggcggtttgcttatctttttgtgaatatcaatgtgacctctgagcctcacgaagtgtctgccctgtggttcttgtggtatgtgaagcagtgcgggggcaccactcggatattctctgtcaccaatggtggccaggaacggaagtttgtaggtggatctggtcaagtgagcgaacggataatggacctcctcggagaccaagtgaagctgaaccatcctgtcactcacgttgaccagtcaagtgacaacatcatcatagagacgctgaaccatgaacattatgagtgcaaatacgtaattaatgcgatccctccgaccttgactgccaagattcacttcagaccagagcttccagcagagagaaaccagttaattcagcgtcttccaatgggagctgtcattaagtgcatgatgtattacaaggaggccttctggaagaagaaggattactgtggctgcatgatcattgaagatgaagatgctccaatttcaataaccttggatgacaccaagccagatgggtcactgcctgccatcatgggcttcattcttgcccggaaagctgatcgacttgctaagctacataaggaaataaggaagaagaaaatctgtgagctctatgccaaagtgctgggatcccaagaagctttacatccagtgcattatgaagagaagaactggtgtgaggagcagtactctgggggctgctacacggcctacttccctcctgggatcatgactcaatatggaagggtgattcgtcaacccgtgggcaggattttctttgcgggcacagagactgccacaaagtggagcggctacatggaaggggcagttgaggctggagaacgagcagctagggaggtcttaaatggtctcgggaaggtgaccgagaaagacatctgggtacaagaacctgaatcaaaggacgttccagcggtagaaatcacccacaccttctgggaaaggaacctgccctctgtttctggcctgctgaagatcattggattttccacatcagtaactgccctggggtttgtgctgtacaaatacaagctcctgccacggtcttgaagttctgttcttatgctctctgctcactggttttcaataccaccaagaggaaaatattgacaagtttaaaggctgtgtcattgggccatgtttaagtgtactggatttaactacctttggcttaattccaatcattgttaaagtaaaaacaattcaaagaatcacctaattaatttcagtaagatcaagctccatcttatttgtcagtgtagatcaactcatgttaattgatagaataaagccttgtgatcactttctgaaattcacaaagttaaacgtgatgtgctcatcagaaac

SEQ ID NO: 245 - DNA, 456 bp, Homo sapiens
  modified_base (431): a, t, c, g, other or unknown
  modified_base (450): a, t, c, g, other or unknown
  modified_base (456): a, t, c, g, other or unknown
tcctcagtagtttgaacacttgctggctattttttctgtccaagttctcagtaacttcggcctgtgtagtcagtggttctacacagccgacactacttcttacataacacttggtctctctggcttctggaaagggcgaggggttaccttccggagtccagtgctctttcggcacttctgcaaccaggcagtggtaaaaggggtgctctccaaaaccatcttctagcagatctttttcagttaagattacttgttcttccatgtattcatatttaagccagctccttgatcagccgcagtatgtcactgcagtcggcggcagtggctgggcggatcaccgaatttagccattttcggtctttttgctttttcttccctttgcgggaccagggccccctggtacttgaacagtaggaggaaggtgggttccncaatcggtctcccggggangcggtn

SEQ ID NO: 246 - DNA, 210 bp, Homo sapiens
cacagatgaaggacgtgttcttcttcctcttcttcctcggcgtgtggctggtagcctatggcgtggccacggaggggctcctgaggccacgggacagtgacttcccaagtatcctgcgccgcgtcttctaccgtccctacctgcagatcttcgggcagattccccaggaggacatggacgtggccctcatggagcacagcaactgctcgt

SEQ ID NO: 247 - DNA, 227 bp, Homo sapiens
ggcagcctcgccagcgggggccccgggcctggccatgcctcactgagccagcgcctgcgcctctacctcgccgacagctggaaccagtgcgacctagtggctctcacctgcttcctcctgggcgtgggctgccggctgaccccgggtttgtaccacctgggccgcactgtcctctgcatcgacttcatggttttcacggtgcggctgcttcacatcttcacggtcaa

SEQ ID NO: 248 - DNA, 266 bp, Homo sapiens
  modified_base (240): a, t, c, g, other or unknown
  modified_base (257): a, t, c, g, other or unknown
ttggagaatcaaatggaaacacagggggaaagatatagagcttccgtccaccatctatgaagccctccacctgcctgacatcaagttttttcctaatgtgtatgcattgctgaaggtcctgtgtattcttcctgtgatgaaggttgagaatgagcggtatgaaaatgggacgaaagcgtctttaaagcatatttgagggaacactttgacagacccaaaggtcaagtactttggcttttnctttaacataaattttngatattaaa

SEQ ID NO: 249 - DNA, 394 bp, Homo sapiens
  modified_base (293): a, t, c, g, other or unknown
tttttgagggcaacatctcgctttatttttatttatttatttatttatttatatttgagacagagtcttaacactgttgcccaggctggagtgcaatggcgtgatctcagctcactgcaagctctgcctcctggattcatgcctttctcctgcctcagcctcccgagtagctgggaccacaggtgcccaccaccacgcccagctaattttttgtacttttagtagagacagggttttaccgtgttagccaggatagtctcgatctcctgacctcgtgagccgcccgcctcggnctcccaaagtgctgggattacaggcatgagcaccgtgcctggccacgtccctattttagaaatgagaggagtgactgcacataggaaaaatgccactttta

SEQ ID NO: 250 - DNA, 548 bp, Oryctolagus cuniculus
ccgacactcacctagccaccatggacatcgctatccaccacccctggatccgccgccccttctttccttttcactcgcccagccgcctctttgaccagttcttcggagagcacctgttggagtctgatctcttcccaacttctacttccctgagccccttctatcttcggccaccctcattcctgcgggcacccagctggattgacactggactctcagagatgcgcctggagaaggacaggttctctgtcaacctggatgtgaagcacttctccccagaggagctcaaggtcaaagtgttgggtgatgtgattgaggtgcacggcaaacatgaagagcgccaggatgaacatggtttcatctccagggagttccacaggaaataccggatcccagctgatgtggaccctctcaccattacttcatccctgtcatctgatggggtcctcactgtgaatggaccaaggaagcaagcccctggcccagagcgcaccattcccataacccgtgaagagaagcctgctgtcactgcagcccccaagaagtag

SEQ ID NO: 251 - DNA, 313 bp, Homo sapiens
aattcggcccgagggtcagaaccctgccatggaactgtttccttcatcatgagttctgctgaatgccgcgatgggtcaggtaggggggaaacaggttgggatgggataggactagcaccattttaagtccctgtcacctcttccgactctttctgagtgccttctgtggggactccggctgtgctgggagaaatacttgaacttgcctcttttacctgctgcttctccaaaaatctgccttgggttttgttccctattgttgctctcgtgtcttccttaaccccctccttcataatgaagggtgcatgggaga

SEQ ID NO: 252 - DNA, 433 bp, Homo sapiens
ttttttaactcatgtggttaacatggtattgtataaaaagaaaaaaaaaacaccactcaatacttactaagccttgcagacagctcagagttgaggcagcatattgggcatagagatcataggatttgtattatcccttgcaagatggaactccaaccaacaccagaattttccaattcaaattcagttttagtcgagaccccagcataatttttagaaaaaagattggattgttgcttttcttttaattttccattcctatttagacaaatgaccagaggcaatgacaaaagtaactgtttaaaagggatttctctccagaagttttttctaaaggtttaagtccaggctttccatccttctctccatcctttttcattttaaaaagaagggttttggaatatgtcaacctttactcagcttgctatacaaa

SEQ ID NO: 253 - DNA, 468 bp, Homo sapiens
gtgattgaacagaggcagtgtactggagtttggaaccagaaagatgaattacctattgaagtggaccttggtaaaaagtgctggtatcactctatatttgcctgccccattcttcgtcagcaaacaacagataacaatccacccatgaaattggtctgtggtcatattatatcaagagatgccctgaataaaatgtttaatggtagcaaattaaaatgtccctactgtccaatggaacaaagtccaggagatgccaaacagatatttttctgaagagataactttagtttgcaatttgtaagtgaaactgaatcgtgggtgcatttcagaagagaacgttccatataatgcagctaaccaaggactcctgtgtttctataagctaatgctccagaaacttttgccaacctgttagtgtacacacactgaggggagtgctcccggtgaatattatcatagggccttatt

SEQ ID NO: 254 - DNA, 493 bp, Homo sapiens
ttgtaaagaattgaattctttatttgtgatatccataaacgttgctattctctatttctatccagaaaggcaattttcacctattatcacttttgttcttctcttataaacaacaacttgaatgctattgcaggaaagggctacaaatatacatttgttaaccaagcagaatacacagatattttgctttacaacttgcacctaaaataccagtatacgtagctggttcattagttgtcatagcaatttagggctattgccaagctatgcatagcagtttacattttcaaacctcatatagaaagggctattgtgatatgaactggcaactacattcctgtgaagcccatctcagttacaagcaaatgtgttaacttccaattctgcaaagaattttgatggcaaaacttccaaatctgatgcaattgtcttaagcaagtttttaaacaaattgtttcgcagctactctgccattctgccagtagatggtgct

SEQ ID NO: 255 - DNA, 348 bp, Homo sapiens
  modified_base (283): a, t, c, g, other or unknown
  modified_base (334): a, t, c, g, other or unknown
tggtatctggtggtcgaggcttgaagagtggagagaactttaagttgttatatgacttggcagatcaactacatgctgcagttggtgcttcccgtgctgctgttgatgctggctttgttcccaatgacatgcaagttggacagacgggaaaaatagtagcaccagaactttatattgctgttggaatatctgggagccatccaacatttagctggggatgaaagacagcaagacaattgtggccaattaataaagacccagaagctcccaattttcccaagtngccagattatgggattagttgcaggtttattttaaggtagttccctggaantgacttgaggtatt

SEQ ID NO: 256 - DNA, 1058 bp, Homo sapiens
atggaaaccaacttctccactcctctgaatgaatatgaagaagtgtcctatgagtctgctggctacactgttctgcggatcctcccattggtggtgcttggggtcacctttgtcctcggggtcctgggcaatgggcttgtgatctgggtggctggattccggatgacacgcacagtcaccaccatctgttacctgaacctggccctggctgacttttctttcacggccacattaccattcctcattgtctccatggccatgggagaaaaatggccttttggctggttcctgtgtaagttaattcacatcgtggtggacatcaacctctttggaagtgtcttcttgattggtttcattgcactggaccgctgcatttgtgtcctgcatccagtctgggcccagaaccaccgcactgtgagtctggccatgaaggtgatcgtcggaccttggattcttgctctagtccttaccttgccagttttcctctttttgactacagtaactattccaaatggggacacatactgtactttcaactttgcatcctggggtggcacccctgaggagaggctgaaggtggccattaccatgctgacagccagagggattatccggtttgtcattggctttagcttgccgatgtccattgttgccatctgctatgggctcattgcagccaagatccacaaaaagggcatgattaaatccagccgtcccttacgggtcctcactgctgtggtggcttctttcttcatctgttggtttccctttcaactggttgcccttctgggcaccgtctggctcaaagagatgttgttctatggcaagtacaaaatcattgacatcctggttaacccaacgagctccctggccttcttcaacagctgcctcaaccccatgctttacgtctttgtgggccaagacttccgagagagactgatccactccctgcccaccagtctggagagggccctgtctgaggactcagccccaactaatgacacggctgccaattgtgcttcacctcctgcagagactgagttacaggcaatgtgagg

SEQ ID NO: 257 - DNA, 504 bp, Homo sapiens
  modified_base (14): a, t, c, g, other or unknown
  modified_base (46)..(47): a, t, c, g, other or unknown
  modified_base (50): a, t, c, g, other or unknown
  modified_base (92): a, t, c, g, other or unknown
  modified_base (111): a, t, c, g, other or unknown
  modified_base (117): a, t, c, g, other or unknown
  modified_base (423): a, t, c, g, other or unknown
  modified_base (428): a, t, c, g, other or unknown
  modified_base (458): a, t, c, g, other or unknown
  modified_base (474): a, t, c, g, other or unknown
  modified_base (486): a, t, c, g, other or unknown
tatgttagaaattnctttattattacttatccttattaagcgccannttnaatgctgcagaaaatttcaaatcacccttgataacccacttnctttcctcccacccaaatncttgancaagagtttttcaagtaaagacatgctcttctctctcctgtataaaactttacgaaataaaggcaaaagattgtgtacatcttgctgggaaaatgctgcccggggctctgggagacggtgggctgcccgggctcccttcactgtccgggtcctgaaaggactcttgttcatggaactgtctcttcacaaaggcaaggtccaccacttgctgggggtttatcattctgaggggtcggaaaacttttctcacaaggtctcaggtccagtctcttggccttaggctgttgtaaaaggggttttcatcanttcancttccctttgtttggagggttggggataantggggttagggggggnaacgggggtttngggggttgggggaattag

SEQ ID NO: 258 - DNA, 3295 bp, Homo sapiens
gcgcaggtactcaggtatgtctcaagtccatgtcctccaaacagactcagcatctagctcaccgctgccaacacgacttccactgtactcttgatcaatttaccttgatgcactaccggtgaagaacggggactcgaattcccttacaaacgcctccagcttgtagaggcggtcgtggaggacccagaggaggagacgaaggggaaggaggcggtggtggaggaggcaaaggccttggacgaccattgttggcgaggggcaccactccgggagaggcggcgctgggcgtcttgggggtgcgcgccgggagcctgcagcgggaccagcgtgggaacgcggctggcaggctgtggacctcgtcctcaccaccatggtcgggctccttttgttttttttcccagcgatctttttggaggtgtcccttctccccagaagccccggcaggaaagtgttgctggcaggagcgtcgtctcagcgctcggtggccagaatggacggagatgtcatcattggagccctcttctcagtccatcaccagcctccggccgagaaagtgcccgagaggaagtgtggggagatcagggagcagtatggcatccagagggtggaggccatgttccacacgttggataagatcaacgcggacccggtcctcctgcccaacatcaccctgggcagtgagatccgggactcctgctggcactcttccgtggctctggaacagagcattgagttcattagggactctctgatttccattcgagatgagaaggatgggatcaaccggtgtctgcctgacggccagtccctccccccaggcaggactaagaagcccattgcgggagtgatcggtcccggctccagctctgtagccattcaagtgcagaacctgctccagctcttcgacatcccccagatcgcttattcagccacaagcatcgacctgagtgacaaaactttgtacaaatacttcctgagggttgtcccttctgacactttgcaggcaagggccatgcttgacatagtcaaacgttacaattggacctatgtctctgcagtccacacggaagggaattatggggagagcggaatggacgctttcaaagagctggctgcccaggaaggcctctgtatcgcccattctgacaaaatctacagcaacgctggggagaagagctttgaccgactcttgcgcaaactccgagagaggcttcccaaggctagagtggtggtctgcttctgtgaaggcatgacagtgcgaggactcctgagcgccatgcggcgccttggcgtcgtgggcgagttctcactcattggaagtgatggatgggcagacagagatgaagtcattgaaggttatgaggtggaagccaacgggggaatcacgataaagctgcagtctccagaggtcaggtcatttgatgattatttcctgaaactgaggctggacactaacacgaggaatccctggttccctgagttctggcaacatcggttccagtgccgccttccaggacaccttctggaaaatcccaactttaaacgaatctgcacaggcaatgaaagcttagaagaaaactatgtccaggacagtaagatggggtttgtcatcaatgccatctatgccatggcacatgggctgcagaacatgcaccatgccctctgccctggccacgtgggcctctgcgatgccatgaagcccatcgacggcagcaagctgctggacttcctcatcaagtcctcattcattggagtatctggagaggaggtgtggtttgatgagaaaggagacgctcctggaaggtatgatatcatgaatctgcagtacactgaagctaatcgctatgactatgtgcacgttggaacctggcatgaaggagtgctgaacattgatgattacaaaatccagatgaacaagagtggagtggtgcggtctgtgtgcagtgagccttgcttaaagggccagattaaggttatacggaaaggagaagtgagctgctgctggatttgcacggcctgcaaagagaatgaatatgtgcaagatgagttcacctgcaaagcttgtgacttgggatggtggcccaatgcagatctaacaggctgtgagcccattcctgtgcgctatcttgagtggagcaacatcgaatccattatagccatcgccttttcatgcctgggaatccttgttaccttgtttgtcaccctaatctttgtactgtaccgggacacaccagtggtcaaatcctccagtcgggagctctgctacatcatcctagctggcatcttccttggttatgtgtgcccattcactctcattgccaaacctactaccacctcctgctacctccagcgcctcttggttggcctctcctctgcgatgtgctactctgctttagtgactaaaaccaatcgtattgcacgcatcctggctggcagcaagaagaagatctgcacccggaagcccaggttcatgagtgcctgggctcaggtgatcattgcctcaattctgattagtgtgcaactaaccctggtggtaaccctgatcatcatggaaccccctatgcccattctgtcctacccaagtatcaaggaagtctaccttatctgcaataccagcaacctgggtgtggtggcccctttgggctacaatggactcctcatcatgagctgtacctactatgccttcaagacccgcaacgtgcccgccaacttcaacgaggccaaatatatcgcgttcaccatgtacaccacctgtatcatctggctagcttttgtgcccatttactttgggagcaactacaagatcatcacaacttgctttgcagtgagtctcagtgtaacagtggctctggggtgcatgttcactcccaagatgtacatcattattgccaagcctgagaggaatgtccgcagtgccttcaccacctctgatgttgtccgcatgcatgttggcgatggcaagctgccctgccgctccaacactttcctcaacatcttccgaagaaagaaggcaggggcagggaatgccaagaagaggcagccagaattctcgcccaccagccaatgtccgtcggcacatgtgcagctttgaaaacccccacactgcagtgaatgtttctaatggcaagtctgtgtcatggtctgaaccaggtggaggacaggtgcccaagggacagcatatgtggcaccgcctctctgtgcacgtgaagaccaatgagacggcctgcaaccaaacagccgtcatcaaacccctcactaaaagttaccaaggctctggcaagagcctgaccttttc

SEQ ID NO: 259 - DNA, 4892 bp, Homo sapiens
gccagctgagcccgagcccagaccgcgcccgcgccgccatgcccctggccttctgcggcagcgagaaccactcggccgcctaccgggtggaccagggggtcctcaacaacggctgctttgtggacgtcctcaacgtggtgccgcacgtcttcctactcttcatcaccttccccatcctcttcattggatggggaagtcagagctccaaggtgcacatccaccacagcacatggcttcatttccctgggcacaacctgcggtggatcctgaccttcatgctgctcttcgtcctggtgtgtgagattgcagagggcatcctgtctgatggggtgaccgaatcccaccatctgcacctgtacatgccagccgggatggcgttcatggctgctgtcacctccgtggtctactatcacaacatcgagacttccaacttccccaagctgctaattgccctgctggtgtattggaccctggccttcatcaccaagaccatcaagtttgtcaagttcttggaccacgccatcgcgttctcgcaggtacgcttctgcctcacagggctgctggtgatcctctatgggatgctgctcctcgtggaggtcaatgtcatcagggtgaggagatacatcttcttcaagacaccgagggaggtgaagcctcccgaggacctgcaagacctgggggtacgcttcctgcagcccttcgtgaatctgctgtccaaaggcacctactggtggatgaacgccttcatcaagactgcccacaagaagcccatcgacttgcgagccatcgggaagctgcccatcgccatgagggccctcaccaactaccaacggctctgcgaggcctttgacgcccaggtgcggaaggacattcagggcactcaaggtgcccgggccatctggcaggcactcagccatgccttcgggaggcgcctggtcctcagcagcactttccgcatcttggccgacctgctgggcttcgccgggccactgtgcatctttgggatcgtggaccaccttgggaaggagaacgacgtcttccagcccaagacacaatttctcggggtttactttgtctcatcccaagagttccttgccaatgcctacgtcttagctgtgcttctgttccttgccctcctactgcaaaggacatttctgcaagcatcctactatgtggccattgaaactggaattaacttgagaggagcaatacagaccaagatttacaataaaattatgcacctgtccacctccaacctgtccatgggagaaatgactgctggacagatctgtaatctggttgccatcgacaccaatcagctcatgtggtttttcttcttgtgcccaaacctctgggctatgccagtacagatcattgtgggtgtgattctcctctactacatactcggagtcagtgccttaattggagcagctgtcatcattctactggctcctgtccagtacttcgtggccaccaagctgtctcaggcccagcggacgacactggagtattccaatgagcggctgaagcagaccaacgagatgctccgcggcatcaagctgctgaagctgtacgcctgggagaacatcttccgcacgcgggtggagacgacccgcaggaaggagatgaccagcctcagggcctttgccatctatacctccatctccattttcatgaacacggccatccccattgcagctgtcctcataactttcgtgggccatgtcagcttcttcaaagaggccgacttctcgccctccgtggcctttgcctccctctccctcttccatatcttggtcacaccgctgttcctgctgtccagtgtggtccgatctaccgtcaaagctctagtgagcgtgcaaaagctaagcgagttcctgtccagtgcagagatccgtgaggagcagtgtgccccccatgagcccacacctcagggcccagccagcaagtaccaggcggtgcccctcagggttgtgaaccgcaagcgtccagcccgggaggattgtcggggcctcaccggcccactgcagagcctggtccccagtgcagatggcgatgctgacaactgctgtgtccagatcatgggaggctacttcacgtggaccccagatggaatccccacactgtccaacatcaccattcgtatcccccgaggccagctgactatgatcgtggggcaggtgggctgcggcaagtcctcgctccttctagccgcactgggggagatgcagaaggtctcaggggctgtcttctggagcagccttcctgacagcgagataggagaggaccccagcccagagcgggagacagcgaccgacttggatatcaggaagagaggccccgtggcctatgcttcgcagaaaccatggctgctaaatgccactgtggaggagaacatcatctttgagagtcccttcaacaaacaacggtacaagatggtcattgaagcctgctctctgcagccagacatcgacatcctgccccatggagaccagacccagattggggaacggggcatcaacctgtctggtggtcaacgccagcgaatcagtgtggcccgagccctctaccagcacgccaacgttgtcttcttggatgaccccttctcagctctggatatccatctgagtgaccacttaatgcaggccggcatccttgagctgctccgggacgacaagaggacagtggtcttagtgacccacaagctacagtacctgccccatgcagactggatcattgccatgaaggatggcaccatccagagggagggtaccctcaaggacttccagaggtctgaatgccagctctttgagcactggaagaccctcatgaaccgacaggaccaagagctggagaaggagactgtcacagagagaaaagccacagagccaccccagggcctatctcgtgccatgtcctcgagggatggccttctgcaggatgaggaagaggaggaagaggaggcagctgagagcgaggaggatgacaacctgtcgtccatgctgcaccagcgtgctgagatcccatggcgagcctgcgccaagtacctgtcctccgccggcatcctgctcctgtcgttgctggtcttctcacagctgctcaagcacatggtcctggtggccatcgactactggctggccaagtggaccgacagcgccctgaccctgacccctgcagccaggaactgctccctcagccaggagtgcaccctcgaccagactgtctatgccatggtgttcacggctgtctgcagcctgggcattgtgctgtgcctcgtcacgtctgtcactgtggagtggacagggctgaaggtggccaagagactgcaccgcagcctgctaaaccggatcatcctagcccccatgaggttttttgagaccacgccccttgggagcatcctgaacagattttcatctgactgtaacaccatcgaccagcacatcccatccacgctggagtgcctgagccgctccaccctgctctgtgtctcagccctggccgtcatctcctatgtcacacctgtgttcctcgtggccctcttgcccctggccatcgtgtgctacttcatccagaagtacttccgggtggcgtccagggacctgcagcagctggatgacaccacccagcttccacttctctcacactttgccgaaaccgtagaaggactcaccaccatccgggccttcaggtatgaggcccggttccagcagaagcttctcgaatacacagactccaacaacattgcttccctcttcctcacagctgccaacagatggctggaagtccgaatggagtacatcggtgcatgtgtggtgctcatcgcagcggtgacctccatctccaactccctgcacagggagctctctgctggcctggtgggcctgggccttacctacgccctaatggtctccaactacctcaactggatggtgaggaacctggcagacatggagctccagctgggggctgtgaagcgcatccatgggctcctgaaaaccgaggcagagagctacgagggactcctggcaccatcgctgatcccaaagaactggccagaccaagggaagatccagatccagaacctgagcgtgcgctacgacagctccctgaagccggtgctgaagcacgtcaatgccctcatctcccctggacagaagatcgggatctgcggccgcaccggcagtgggaagtcctccttctctcttgccttcttccgcatggtggacacgttcgaagggcacatcatcattgatggcattgacatcgccaaactgccgctgcacaccctgcgctcacgcctctccatcatcctgcaggaccccgtcctcttcagcggcaccatccgatttaacctggaccctgagaggaagtgctcagatagcacactgtgggaggccctggaaatcgcccagctgaagctggtggtgaaggcactgccaggaggcctcgatgccatcatcacagaaggcggggagaatttcagccagggacagaggcagctgttctgcctggcccgggccttcgtgaggaagaccagcatcttcatcatggacgaggccacggcttccattgacatggccacggaaaacatcctccaaaaggtggtgatgacagccttcgcagaccgcactgtggtcaccatcgcgcatcgagtgcacaccatcctgagtgcagacctggtgatcgtcctgaagcggggtgccatccttgagttcgataagccagagaagctgctcagccggaaggacagcgtcttcgcctccttcgtccgtgcagacaagtgacctgccagagcccaagtgccatcccacattcggaccctgcccatacccctgcctgggttttctaactgtaaatcacttgtaaataaatagatttgattatttcctaaa

SEQ ID NO: 260 - DNA, 503 bp, Homo sapiens
gaaagaaacagataacaccaaaccaaaccccgtagctccatattggacatccccagaaaagatggaaaagaaattgcatgcagtgccggctgccaagacagtgaagttcaaatgcccttccagtgggaccccaaaccccacactgcgctggttgaaaaatggcaaagaattcaaacctgaccacagaattggaggctacaaggtccgttatgccacctggagcatcataatggactctgtggtgccctctgacaagggcaactacacctgcattgtggagaatgagtacggcagcatcaaccacacataccagctggatgtcgtggagcggtcccctcaccggcccatcctgcaagcagggttgcccgccaacaaaacagtggcctgggtagcaacgtggagttcatgtgtaaggtgtacagtgacccgcagccgcacatccagtggctaaagcacatcgaggtgaatgggagcaagattggcccagacaacctgcttatgtc

SEQ ID NO: 261 - DNA, 1496 bp, Homo sapiens
gacaaaccttttcgaggcaaaaggcaaaaaaggctgctctgggattctcttcagccaatcttcaatgctcaagtgtctgaagcagccatggcagaagtacctaagctcgccagtgaaatgatggcttattacagtggcaatgagcatgacttgttctttgaagctgatggccctaaacagatgaagtgctccttccaggacctggacctctgccctctggatggcggcatccagctacgaatctccgaccaccactacagcaagggcttcaggcaggccgcgtcagttgttgtggccatggacaagctgaggaagatgctggttccctgcccacagaccttccaggagaatgacctgagcaccttctttcccttcatctttgaagaagaacctatcttcttcgacacatgggataaccaggcttatgtgcacgatgcacctgtacgatcactgaactgcacgctccgggactcacagcaaaaaagcttggtgatgtctggtccatatgaactgaaagctctccacctccagggacaggatatggagcaacaagtggtgttctccatgtcctttgtacaaggagaagaaagtaatgacaaaatacctgtggccttggccctcaaggaaaagaatctgtacctgtcctgcgtgttgaaagatgataagcccactctacagctggagagtgtagatcccaaaaattacccaaagaagaagatggaaaagccatttgtgttcaacaagatagaaatcaataacaagctggaatttgagtctgcccagttccccaactggtacatcagcacctctcaagcagaaaacatgcccgtcttcctgggagggaccaaaggcggccaggatataactgacttcaccatgcaatttgtgtcttcctaaagagagctgtacccagagagtcctgtgctgaatgtggactcaatccctagggctggcagaaagggaacagaaaggtttttcagtacggctatagcctggactttcctgttgtctacaccaatgcccaactgcctgccttagggtagtgctaagaggatctcctgtccatcagccaggacagtcagctctctcctttcaggccaatcccagcccttttgttgagccaggcctctctcacctctcctactcacttaaagcccgcctcacagaaaccaggccacattttggttctaagaaaccctcctctctcattcgctcccacattctgatgagcaaccgcttccctatttatttatttatttgtttgtttgttttgattcattggtctaatttattcaaagggggcaagaagtagcagtgtctgtaaaagagcctagtttttaatagctatggaatcaattcaatttggactggtgtgctctctttaaatcaagtcctttaattaagactgaaaatatataagctcagattatttaaatgggaatatttataaatgagcaaatatcatactgttcaatggttctcaaataaacttcact

SEQ ID NO: 262 - DNA, 290 bp, Homo sapiens
ttttttttttttatatttcaccttttttattgaatttgtattaaaggaggtagtgagggggcggaacgacttaagagtcagaatccatattagactctggggagtgaaaaattaaattaaatcagtaagatggggagtgggggaagagtcagagggaactttgcccacctttgaagatcaaatcaagaaatcagggaaagcaaagacttaggagaggagaaagacattctctcaatccatcctccttccccagggcagagaattaaacaacgttactgagtgagcctctg

SEQ ID NO: 263 - DNA, 1860 bp, Homo sapiens
cgtgaacggtcgttgcagagattgcgggcggctgagacgccgcctgcctggcacctaggagcgcagcggagccccgacaccgccgccgccgccatggagtccgagaccgaacccgagcccgtcacgctcctggtgaagagccccaaccagcgccaccgcgacttggagctgagtggcgaccgcggctggagtgtgggccacctcaaggcccacctgagccgcgtctaccccgagcgtccgcgtccagaggaccagaggttaatttattctgggaagctgttgttggatcaccaatgtctcagggacttgcttccaaagcaggaaaaacggcatgttttgcatctggtgtgcaatgtgaagagtccttcaaaaatgccagaaatcaacgccaaggtggctgaatccacagaggagcctgctggttctaatcggggacagtatcctgaggattcctcaagtgatggtttaaggcaaagggaagttcttcggaacctttcttcccctggatgggaaaacatctcaaggcctgaagctgcccagcaggcattccaaggcctgggtcctggtttctccggttacacaccctatgggtggcttcagctttcctggttccagcagatatatgcacgacagtactacatgcaatatttagcagccactgctgcatcaggggcttttgttccaccaccaagtgcacaagagatacctgtggtctctgcacctgctccagcccctattcacaaccagtttccagctgaaaaccagcctgccaatcagaatgctgctcctcaagtggttgttaatcctggagccaatcaaaatttgcggatgaatgcacaaggtggccctattgtggaagaagatgatgaaataaatcgagattggttggattggacctattcagcagctacattttctgtttttctcagtatcctctacttctactcctccctgagcagattcctcatggtcatgggggccaccgttgttatgtacctgcatcacgttgggtggtttccatttagaccgaggccggttcagaacttcccaaatgatggtcctcctcctgacgttgtaaatcaggaccccaacaataacttacaggaaggcactgatcctgaaactgaagaccccaaccacctccctccagacagggatgtactagatggcgagcagaccagcccctcctttatgagcacagcatggcttgtcttcaagactttctttgcctctcttcttccagaaggccccccagccatcgcaaactgatggtgtttgtgctgtagctgttggaggctttgacaggaatggactggatcacctgactccagctagattgcctctcctggacatggcaatgatgagtttttaaaaaacagtgtggatgatgatatgcttttgtgagcaagcaaaagcagaaacgtgaagccgtgatacaaattggtgaacaaaaaatgcccaaggcttctcatgtgtttattctgaagagctttaatatatactctatgtagtttaataagcactgtacgtagaaggccttaggtgttgcatgtctatgcttgaggaacttttccaaatgtgtgtgtctgcatgtgtgtttgtacatagaagtcatagatgcagaagtggttctgctggtaagatttgattcctgttggaatgtttaaattacactaagtgtactactttatataatcaatgaaattgctagacatgttttagcaggacttttctaggaaagacttatgtataattgctttttaaaatgcagtgctttactttaaactaaggggaactttgcggaggtgaaaacctttgctgggttttctgttcaataaagttttactatgaatgaccctg

SEQ ID NO: 264 - DNA, 2564 bp, Homo sapiens
tcgccgggtgtcccagtgtcaccaacactcggccgccgccgccagcttggcgcgcaccgccgcctccgccaccgccgacagcgcgcatcctccgtgtccccgctccgccgcccgagcaggtgccactatgcacgtgaagaagtacctgctgaagggcctgcatcggctgcagaagggccccggctacacgtacaaggagctgctggtgtggtactgcgacaacaccaacacccacggccccaagcgcatcatctgtgaggggcccaagaagaaagccatgtggttcctgctcaccctgctcttcgccgccctcgtctgctggcagtggggcatcttcatcaggacctacttgagctgggaggtcagcgtctccctctccgtaggcttcaagaccatggacttccccgccgtcaccatctgcaatgctagccccttcaagtattccaaaatcaagcatttgctgaaggacctggatgagctgatggaagctgtcctggagagaatcctggctcctgagctaagccatgccaatgccaccaggaacctgaacttctccatctggaaccacacacccctggtccttattgatgaacggaacccccaccaccccatggtccttgatctctttggagacaaccacaatggcttaacaagcagctcagcatcagaaaagatctgtaatgcccacgggtgcaaaatggccatgagactatgtagcctcaacaggacccagtgtaccttccggaacttcaccagtgctacccaggcattgacagagtggtacatcctgcaggccaccaacatctttgcacaggtgccacagcaggagctagtagagatgagctaccccggcgagcagatgatcctggcctgcctattcggagctgagccctgcaactaccggaacttcacgtccatcttctaccctcactatggcaactgttacatcttcaactggggcatgacagagaaggcacttccttcggccaaccctggaactgaattcggcctgaagttgatcctggacataggccaggaagactacgtccccttccttgcgtccacgggcggggtcaggctgatgcttcacgagcagaggtcataccccttcatcagagatgagggcatctacgccatgtcggggacagagacgtccatcggggtactcgtggataagcttcagcgcatgggggagccctacagcccgtgcaccgtgaatggttctgaggtccccgtccaaaacttctacagtgactacaacacgacctactccatccaggcctgtcttcgctcctgcttccaagaccacatgatccgtaactgcaactgtggccactacctgtacccactgccccgtggggagaaatactgcaacaaccgggacttcccagactgggcccattgctactcagatctacagatgagcgtggcgcagagagagacctgcattggcatgtgcaaggagtcctgcaatgacacccagtacaagatgaccatctccatggctgactggccttctgaggcctccgaggactggattttccacgtcttgtctcaggagcgggaccaaagcaccaatatcaccctgagcaggaagggaattgtcaagctcaacatctacttccaagaatttaactatcgcaccattgaagaatcagcagccaataacatcgtctggctgctctcgaatctgggtggccagtttggcttctggatggggggctctgtgctgtgcctcatcgagtttggggagatcatcatcgactttgtgtggatcaccatcatcaagctggtggccttggccaagagcctacggcagcggcgagcccaagccagctacgctggcccaccgcccaccgtggccgagctggtggaggcccacaccaactttggcttccagcctgacacggccccccgcagccccaacactgggccctaccccagtgagcaggccctgcccatcccaggcaccccgccccccaactatgactccctgcgtctgcagccgctggacgtcatcgagtctgacagtgagggtgatgccatctaaccctgcccctgtccaccccgggtgggtgaaactcactgagcagccaagactgttgcccgaggactcactgtatggtgccctctccaaagggtcgggagggtagctctccaggccagagcttgtgtccttcaacagagaggccagcggcaactggtccgttactggccaagggctctgaagaatcaacggtgctggtacaggatacaggaataaattgtatcttcacctggttcctaccctcgtccctacctgtcctgatcctggtcctgaagacccctcggaacaccctctcctggtggcaggccacttccctcccagtgccagtctccatccaccccagagaggaacaggcgggtgggccatgtggttttctccttcctggccttggctggcctctggggcaggggtggtggagagatggaagggcatcaggtgtagggaccctgccaagtggcacctgatttactctagaaaataaaagtagaaaatactgagaaaaaaaaaaaaaaaaaaa

SEQ ID NO: 265 - DNA, 2218 bp, Homo sapiens
cctcgccgcatccactctccggccggccgcctgcccgccgcctcctccgtgcgcccgccagcctcgcccgcgccgtcaccatgagccaggcctactcgtccagccagcgcgtgtcctcctaccgccgcaccttcggcggcgccccgggcttcccgctcggctccccgctgagctcgcccgtgttcccgcgggcgggtttcggctctaagggctcctccagctcggtgacgtcccgcgtgtaccaggtgtcgcgcacgtcgggcggggccgggggcctggggtcgctgcgggccagccggctggggaccacccgcacgccctcctcctacggcgcaggcgagctgctggacttctcactggccgacgcggtgaaccaggagtttctgaccacgcgcaccaacgagaaggtggagctgcaggagctcaatgaccgcttcgccaactacatcgagaaggtgcgcttcctggagcagcagaacgcgctcgccgccgaagtgaaccggctcaagggccgcgagccgacgcgagtggccgagctctacgaggaggagctgcgggagctgcggcgccaggtggaggtgctcactaaccagcgcgcgcgcgtcgacgtcgagcgcgacaacctgctcgacgacctgcagcggctcaaggccaagctgcaggaggagattcagttgaaggaagaagcagagaacaatttggctgccttccgagcggacgtggatgcagctactctagctcgcattgacctggagcgcagaattgaatctctcaacgaggagatcgcgttccttaagaaagtgcatgaagaggagatccgtgagttgcaggctcagcttcaggaacagcaggtccaggtggagatggacatgtctaagccagacctcactgccgccctcagggatatccgggctcagtatgagaccatcgcggctaagaacatttctgaagctgaggagtggtacaagtcgaaggtgtcagacctgacccaggcagccaacaagaacaacgacgccctgcgccaggccaagcaggagatgatggaataccgacaccagatccagtcctacacctgcgagattgacgccctcaagggcactaacgattccctgatgaggcagatgcgggaattggaggaccgatttgccagtgaggccagtggctaccaggacaacattgcgcgcctggaggaagaaatccggcacctcaaggatgagatggcccgccatctgcgcgagtaccaggacctgctcaacgtgaagatggccctggatgtggagattgccacctaccggaagctgctggagggagaggagagccggatcaatctccccatccagacctactctgccctcaacttccgagaaaccagccctgagcaaaggggttctgaggtccataccaagaagacggtgatgatcaagaccatcgagacacgggatggggaggtcgtcagtgaggcgacacagcagcagcatgaagtgctctaaagacgagagaccctctgccaccagagaccgtcctcacccctgtcctcactgctccctgaagcccagccttcttccatcccaggacaccacacccagcctcagtcctcccgtcacagcctctgacccctcctcactggccatccctcgtggtccccaacagcgacatagcccatccctgcctggtcacaggcatgccccggccacctctgcggaccccagctgtgagccttggctgttggcagtgagtgagcctggctcttgtgctggatggagcccaggcgggagcggtggccctgtccctcccacctctgtgacctgaggcctacgctttggctctggagatagccccagagcagggtgttgggatactgcagggccaggactgagccccgcagacctccccagcccctagcccaggagagagaaagccaggcaggtagcctgggggactagccctgtggagactggggggcttgaaattgtccccgtggtctcttactttcctttccccagcccagggtggacttagaaagcaggggctacaagagggaatccccgaaggtgctggaggtgggagcaggagattgagaaggagagaaagtgggtgagatgctggagaagagagaggaggagagaggcagagagcggtctgaggctggtgggaggggcgcccacctccccacgccctccccccccctgctgcaggggctctggagagaaacaataaa

SEQ ID NO: 266 - DNA, 228 bp, Homo sapiens
gcccagttaaataacattgacagacttgccaacacgatcacaatgatcgaagaggagatggtgcagcttcgcaaaagatacgaaaaagctgttcagcatcgaaatgaaaggtaaaaaccagcctctgcctctgaatttgaccatagtggcgttcagctgatagagcgggaagaagaaatatgcattttttatgaaaaaataaatatccaagagaagatgaaactaaat

SEQ ID NO: 267 - DNA, 2282 bp, Homo sapiens
agaagatcctgggttctgtgcatccgtctgtctgaccatccctctcaatcttccctgcccaggactggccatactgccaccgcacacgtgcacacacgccaacaggcatctgccatgctggcatctctataagggctccagtccagagaccctgggccattgaacttgctcctcaggcagaggctgagtccgcacatcacctccaggccctcagaacacctgccccagccccaccatgctcatggcgtccaccacttccggtaaggcttgcccctccatgagtccggtgggcagagtgggtttgacgattcagggaagcccctctttctaaagacctccttcaccctcacctctgggtgtgtctctccaggctgccaatgagtggggaggggagcacagccccacttccccgccagggctggggctggggctggggctggggctgcccttccttctggactgcatgagcctggggtgtgtatccctcataacatggctttcctggagtcccctctgctaggagccaggaagtgggtgtccggatgggggcacgggaggcaggcctgagtccccctgcacagcaccctctctaaccaggccctcttcccgactcctgcccagctgtgcctgggcatccctctctgcccagcctgcccagcaacagcagccaggagaggccactggacacccgggacccgctgctagcccgggcggagctggcgctgctctccatagtctttgtggctgtggccctgagcaatggcctggtgctggcggccctagctcggcggggccggcggggccactgggcacccatacacgtcttcattggccacttgtgcctggccgacctggccgtggctctgttccaagtgctgccccagctggcctggaaggccaccgaccgcttccgtgggccagatgccctgtgtcgggccgtgaagtatctgcagatggtgggcatgtatgcctcctcctacatgatcctggccatgacgctggaccgccaccgtgccatctgccgtcccatgctggcgtaccgccatggaagtggggctcactggaaccggccggtgctagtggcttgggccttctcgctccttctcagcctgccccagctcttcatcttcgcccagcgcaacgtggaaggtggcagcggggtcactgactgctgggcctgctttgcggagccctggggccgtcgcacctatgtcacctggattgccctgatggtgttcgtggcacctaccctgggtatcgccgcctgccaggtgctcatcttccgggagattcatgccagtctggtgccagggccatcagagaggcctggggggcgccgcaggggacgccggacaggcagccccggtgagggagcccacgtgtcagcagctgtggccaagactgtgaggatgacgctagtgattgtggtcgtctatgtgctgtgctgggcacccttcttcctggtgcagctgtgggccgcgtgggacccggaggcacctctggaaggtgggtgtagccgtggctagggctgacggggccacttgggcttggccgcatgcccctgtgccccaccagccatcctgaacccaacctagatcctccacctccacaggggcgccctttgtgctactcatgttgctggccagcctcaacagctgcaccaacccctggatctatgcatctttcagcagcagcgtgtcctcagagctgcgaagcttgctctgctgtgcccggggacgcaccccacccagcctgggtccccaagatgagtcctgcaccaccgccagctcctccctggccaaggacacttcatcgtgaggagctgttgggtgtcttgcctctagaggctttgagaagctcagctgccttcctggggctggtcctgggagccactgggagggggacccgtggagaattggccagagcctgtggccccgaggctgggacactgtgtggccctggacaagccacagcccctgcctgggtctccacatccccagctgtatgaggagagcttcaggccccaggactgtgggggcccctcaggtcagctcactgagctgggtgtaggaggggctgcagcagaggcctgaggagtggcaggaaagagggagcaggtgcccccaggtgagacagcggtcccaggggcctgaaaaggaaggaccaggctggggccaggggaccttcctgtctccgcctttctaatccctccctcctcattctctccctaataaaaattggagctcattttccacatggcaaggggtctccttggatcctct

SEQ ID NO: 268 - DNA, 3148 bp, Homo sapiens
gaattcccgcggagcagcgtgcgcggggccccgggagacggcggcggtagcggcgcgggcagagcaaggacgcggcggatcccactcgcacagcagcgcactcggtgccccgcgcagggtcgcgatgctgcccggtttggcactgctcctgctggccgcctggacggctcgggcgctggaggtacccactgatggtaatgctggcctgctggctgaaccccagattgccatgttctgtggcagactgaacatgcacatgaatgtccagaatgggaagtgggattcagatccatcagggaccaaaacctgcattgataccaaggaaggcatcctgcagtattgccaagaagtctaccctgaactgcagatcaccaatgtggtagaagccaaccaaccagtgaccatccagaactggtgcaagcggggccgcaagcagtgcaagacccatccccactttgtgattccctaccgctgcttagttggtgagtttgtaagtgatgcccttctcgttcctgacaagtgcaaattcttacaccaggagaggatggatgtttgcgaaactcatcttcactggcacaccgtcgccaaagagacatgcagtgagaagagtaccaacttgcatgactacggcatgttgctgccctgcggaattgacaagttccgaggggtagagtttgtgtgttgcccactggctgaagaaagtgacaatgtggattctgctgatgcggaggaggatgactcggatgtctggtggggcggagcagacacagactatgcagatgggagtgaagacaaagtagtagaagtagcagaggaggaagaagtggctgaggtggaagaagaagaagccgatgatgacgaggacgatgaggatggtgatgaggtagaggaagaggctgaggaaccctacgaagaagccacagagagaaccaccagcattgccaccaccaccaccaccaccacagagtctgtggaagaggtggttcgagaggtgtgctctgaacaagccgagacggggccgtgccgagcaatgatctcccgctggtactttgatgtgactgaagggaagtgtgccccattcttttacggcggatgtggcggcaaccggaacaactttgacacagaagagtactgcatggccgtgtgtggcagcgccattcctacaacagcagccagtacccctgatgccgttgacaagtatctcgagacacctggggatgagaatgaacatgcccatttccagaaagccaaagagaggcttgaggccaagcaccgagagagaatgtcccaggtcatgagagaatgggaagaggcagaacgtcaagcaaagaacttgcctaaagctgataagaaggcagttatccagcatttccaggagaaagtggaatctttggaacaggaagcagccaacgagagacagcagctggtggagacacacatggccagagtggaagccatgctcaatgaccgccgccgcctggccctggagaactacatcaccgctctgcaggctgttcctcctcggcctcgtcacgtgttcaatatgctaaagaagtatgtccgcgcagaacagaaggacagacagcacaccctaaagcatttcgagcatgtgcgcatggtggatcccaagaaagccgctcagatccggtcccaggttatgacacacctccgtgtgatttatgagcgcatgaatcagtctctctccctgctctacaacgtgcctgcagtggccgaggagattcaggatgaagttgatgagctgcttcagaaagagcaaaactattcagatgacgtcttggccaacatgattagtgaaccaaggatcagttacggaaacgatgctctcatgccatctttgaccgaaacgaaaaccaccgtggagctccttcccgtgaatggagagttcagcctggacgatctccagccgtggcattcttttggggctgactctgtgccagccaacacagaaaacgaagttgagcctgttgatgcccgccctgctgccgaccgaggactgaccactcgaccaggttctgggttgacaaatatcaagacggaggagatctctgaagtgaagatggatgcagaattccgacatgactcaggatatgaagttcatcatcaaaaattggtgttctttgcagaagatgtgggttcaaacaaaggtgcaatcattggactcatggtgggcggtgttgtcatagcgacagtgatcgtcatcaccttggtgatgctgaagaagaaacagtacacatccattcatcatggtgtggtggaggttgacgccgctgtcaccccagaggagcgccacctgtccaagatgcagcagaacggctacgaaaatccaacctacaagttctttgagcagatgcagaactagacccccgccacagcagcctctgaagttggacagcaaaaccattgcttcactacccatcggtgtccatttatagaataatgtgggaagaaacaaacccgttttatgatttactcattatcgccttttgacagctgtgctgtaacacaagtagatgcctgaacttgaattaatccacacatcagtaatgtattctatctctctttacattttggtctctatactacattattaatgggttttgtgtactgtaaagaatttagctgtatcaaactagtgcatgaatagattctctcctgattatttatcacatagccccttagccagttgtatattattcttgtggtttgtgacccaattaagtcctactttacatatgctttaagaatcgatgggggatgcttcatgtgaacgtgggagttcagctgcttctcttgcctaagtattcctttcctgatcactatgcattttaaagttaaacatttttaagtatttcagatgctttagagagattttttttccatgactgcattttactgtacagattgctgcttctgctatatttgtgatataggaattaagaggatacacacgtttgtttcttcgtgcctgttttatgtgcacacattaggcattgagacttcaagcttttctttttttgtccacgtatctttgggtctttgataaagaaaagaatccctgttcattgtaagcacttttacggggcgggtggggaggggtgctctgctggtcttcaattaccaagaattc

SEQ ID NO: 269 - DNA, 201 bp, Homo sapiens
taaacatcccaaaactggagttttcgaagagaaacatgccaaacctccagatgtagaccttaaaaagttctttacagacaggaagactcatctttatacccttgtgatgaatccagatgacacatttgaggtgttagttgatcaaacagttgtaaacaaaggaagcctcctagaggatgtggttcctcctatcaaacctcc

SEQ ID NO: 270 - DNA, 1639 bp, Homo sapiens
acaaactttcagagacagcagagcacacaagcttctaggacaagagccaggaagaaaccaccggaaggaaccatctcactgtgtgtaaacatgacttccaagctggccgtggctctcttggcagccttcctgatttctgcagctctgtgtgaaggtgcagttttgccaaggagtgctaaagaacttagatgtcagtgcataaagacatactccaaacctttccaccccaaatttatcaaagaactgagagtgattgagagtggaccacactgcgccaacacagaaattattgtaaagctttctgatggaagagagctctgtctggaccccaaggaaaactgggtgcagagggttgtggagaagtttttgaagagggctgagaattcataaaaaaattcattctctgtggtatccaagaatcagtgaagatgccagtgaaacttcaagcaaatctacttcaacacttcatgtattgtgtgggtctgttgtagggttgccagatgcaatacaagattcctggttaaatttgaatttcagtaaacaatgaatagtttttcattgtaccatgaaatatccagaacatacttatatgtaaagtattatttatttgaatctacaaaaaacaacaaataatttttgaatataaggattttcctagatattgcacgggagaatatacaaatagcaaaattgggccaagggccaagagaatatccgaactttaatttcaggaattgaatgggtttgctagaatgtgatatttgaagcatcacataaaaatgatgggacaataaattttgccataaagtcaaatttagctggaaatcctggatttttttctgttaaatctggcaaccctagtctgctagccaggatccacaagtccttgttccactgtgccttggtttctcctttatttctaagtggaaaaagtattagccaccatcttacctcacagtgatgttgtgaggacatgtggaagcactttaagttttttcatcataacataaattattttcaagtgtaacttattaacctatttattatttatgtatttatttaagcatcaaatatttgtgcaagaatttggaaaaatagaagatgaatcattgattgaatagttataaagatgttatagtaaatttattttattttagatattaaatgatgttttattagataaatttcaatcagggtttttagattaaacaaacaaacaattgggtacccagttaaattttcatttcagataaacaacaaataattttttagtataagtacattattgtttatctgaaattttaattgaactaacaatcctagtttgatactcccagtcttgtcattgccagctgtgttggtagtgctgtgttgaattacggaataatgagttagaactattaaaacagccaaaactccacagtcaatattagtaatttcttgctggttgaaacttgtttattatgtacaaatagattcttataatattatttaaatgactgcatttttaaatacaaggctttatatttttaactttaagatgtttttatgtgctctccaaattttttttactgtttctgattgtatggaaatataaaagtaaatatgaaacatttaaaatataatttgttgtcaaagt

SEQ ID NO: 271 - DNA, 969 bp, Homo sapiens
ggatttccgggctccatggcaagatcccttctcctgcccctgcagatcctactgctatccttagccttggaaactgcaggagaagaagcccagggtgacaagattattgatggcgccccatgtgcaagaggctcccacccatggcaggtggccctgctcagtggcaatcagctccactgcggaggcgtcctggtcaatgagcgctgggtgctcactgccgcccactgcaagatgaatgagtacaccgtgcacctgggcagtgatacgctgggcgacaggagagctcagaggatcaaggcctcgaagtcattccgccaccccggctactccacacagacccatgttaatgacctcatgctcgtgaagctcaatagccaggccaggctgtcatccatggtgaagaaagtcaggctgccctcccgctgcgaaccccctggaaccacctgtactgtctccggctggggcactaccacgagcccagatgtgacctttccctctgacctcatgtgcgtggatgtcaagctcatctccccccaggactgcacgaaggtttacaaggacttactggaaaattccatgctgtgcgctggcatccccgactccaagaaaaacgcctgcaatggtgactcagggggaccgttggtgtgcagaggtaccctgcaaggtctggtgtcctggggaactttcccttgcggccaacccaatgacccaggagtctacactcaagtgtgcaagttcaccaagtggataaatgacaccatgaaaaagcatcgctaacgccacactgagttaattaactgtgtgcttccaacagaaaatgcacaggagtgaggacgccgatgacctatgaagtcaaatttgactttacctttcctcaaagatatatttaaacctcatgccctgttgataaaccaatcaaattggtaaagacctaaaaccaaaacaaataaagaaacacaaaaccctcaa

SEQ ID NO: 272 - DNA, 247 bp, Homo sapiens
gtaaaacggtggtctcaatgcccacttagcctctgcctctgaatttgaccatagtggcgttcagctgatagagcgggaagaagaaatatgcattttttatgaaaaaataaatatccaagagaagatgaaactaaatggagaaattgaaatacatctactggaagaaaagatccaattcctgaaaatgaagattgctgagaagcaaagacaaatttgtgtgacccagaaattactgccagccaagagg

SEQ ID NO: 273 - DNA, 240 bp, Homo sapiens
tggtctcaatgcccacttagcctctgcctctgaatttgaccatagtggcgttcagctgatagagcgggaagaagaaatatgcattttttatgaaaaaataaatatccaagagaagatgaaactaaatggagaaattgaaatacatctactggaagaaaagatccaattcctgaaaatgaagattgctgagaagcaaagacaaatttgtgtgacccagaaattactgccagccaagaggtc

SEQ ID NO: 274 - DNA, 390 bp, Homo sapiens
  modified_base (20): a, t, c, g, other or unknown
  modified_base (205): a, t, c, g, other or unknown
  modified_base (236): a, t, c, g, other or unknown
  modified_base (246): a, t, c, g, other or unknown
  modified_base (262): a, t, c, g, other or unknown
  modified_base (294): a, t, c, g, other or unknown
  modified_base (315): a, t, c, g, other or unknown
  modified_base (338): a, t, c, g, other or unknown
  modified_base (387): a, t, c, g, other or unknown
tgagcaggtaacacccaggncattttgatgagatccaaaggagttgtatgcacatgaaagtttgagaagcatcatcatagagaagtaaacatcacacccaacttccttatctttccagtggctaaaccacttaacctctctgggtgttacctgctcatttgtttaaaaaaaaaaaaaaaagtctcacctgctttcatgctgaggncaagttcagatgttcaagcctataatatttnggcagttccncaaatttatgaaaagngttctcagaattggggagacagtcaaagggtncaaagcctcagttaggggggntaagtgtgatttttttttaaagntcacttgcacagcctggctaaatttaggggtaattggaatgtatatttncaa

SEQ ID NO: 275 - DNA, 430 bp, Homo sapiens
ttttttcaaatatatacatttttaatatttgaaatatttacataatggaaccacatcagggttcgagggtaagaacagtgttttcaaatgtcctctccaggtgtgtttaaaaaaaaaaaaaatccagtaatccaaagctcacattatgctttttctaacaggccaatctttacctttcttttaaataagtactcagacatgggaacagttgcatctaatttgtgtgaaaagctgtttaaaacttcttacgttttcaggtaattttactccctggtgaaattctgatctacaacgaagaaagccccaggaatttctctaagcacatcatcagtacatttttaaacactaatgagccaaggtaaaacaagatataaaccttctacaagacaaaaatgaaaacaaatggttagtggttggtaactgccttgaa

SEQ ID NO: 276 - DNA, 412 bp, Homo sapiens
  modified_base (137): a, t, c, g, other or unknown
  modified_base (383): a, t, c, g, other or unknown
  modified_base (407): a, t, c, g, other or unknown
caataaaatgatttattttatatatgcaaaatcaaaatctctttgtacactttaatttttgcaaattcatacaaacataacaatactgctccatataaacttttgtataaacattaaaggaaatatacacatatttngttcttcttgtgcttccaaagcacagaatgtataagtccatctgaagactttctatcatcacatgcaagaacaaatgtcagaggttgggggcagcctcaagtgcactttgtaatgtctctagacaaaagagaagagagttggaggtaggattgtttgggtgactctccctgccccttcccacagaggaaataaggttaccccaaataggcagcttcttacttctttggattcaaactatcctggantattgcatgggttttaaaagggcnccaac

SEQ ID NO: 277 - DNA, 233 bp, Homo sapiens
gctttggtctatgacctctgatatctactttgataattttattatctgttcggaaaaggaagtagcagatcactgggctgcagatggttggagatggaaaataatgatagcaaatgctaataagcctggtgtattaaaacagttaatggcagctgctgaagggcacccatggctttggttgatttatcttgtgacagcaggagtgccaatagcattaattacttcattttgtt

SEQ ID NO: 278 - DNA, 1965 bp, Homo sapiens
  modified_base (1956)..(1957): a, t, c, g, other or unknown
gagagacaaagaccccgaacacctccaacatgaagcttcttcatgttttcctgttatttctgtgcttccacttaaggttttgcaaggtcacttatacatctcaagaggatctggtggagaaaaagtgcttagcaaaaaaatatactcacctctcctgcgataaagtcttctgccagccatggcagagatgcattgagggcacctgtgtttgtaaactaccgtatcagtgcccaaagaatggcactgcagtgtgtgcaactaacaggagaagcttcccaacatactgtcaacaaaagagtttggaatgtcttcatccagggacaaagtttttaaataacggaacatgcacagccgaaggaaagtttagtgtttccttgaagcatggaaatacagattcagagggaatagttgaagtaaaacttgtggaccaagataagacaatgttcatatgcaaaagcagctggagcatgagggaagccaacgtggcctgccttgaccttgggtttcaacaaggtgctgatactcaaagaaggtttaagttgtctgatctctctataaattccactgaatgtctacatgtgcattgccgaggattagagaccagtttggctgaatgtacttttactaagagaagaactatgggttaccaggatttcgctgatgtggtttgttatacacagaaagcagattctccaatggatgacttctttcagtgtgtgaatgggaaatacatttctcagatgaaagcctgtgatggtatcaatgattgtggagaccaaagtgatgaactgtgttgtaaagcatgccaaggcaaaggcttccattgcaaatcgggtgtttgcattccaagccagtatcaatgcaatggtgaggtggactgcattacaggggaagatgaagttggctgtgcaggctttgcatctgtggctcaagaagaaacagaaattttgactgctgacatggatgcagaaagaagacggataaaatcattattacctaaactatcttgtggagttaaaaacagaatgcacattcgaaggaaacgaattgtgggaggaaagcgagcacaactgggagacctcccatggcaggtggcaattaaggatgccagtggaatcacctgtgggggaatttatattggtggctgttggattctgactgctgcacattgtctcagagccagtaaaactcatcgttaccaaatatggacaacagtagtagactggatacaccccgaccttaaacgtatagtaattgaatacgtggatagaattattttccatgaaaactacaatgcaggcacttaccaaaatgacatcgctttgattgaaatgaaaaaagacggaaacaaaaaagattgtgagctgcctcgttccatccctgcctgtgtcccctggtctccttacctattccaacctaatgatacatgcatcgtttctggctggggacgagaaaaagataacgaaagagtcttttcacttcagtggggtgaagttaaactaataagcaactgctctaagttttacggaaatcgtttctatgaaaaagaaatggaatgtgcaggtacatatgatggttccatcgatgcctgtaaaggggactctggaggccccttagtctgtatggatgccaacaatgtgacttatgtctggggtgttgtgagttggggggaaaactgtggaaaaccagagttcccaggtgtttacaccaaagtggccaattattttgactggattagctaccatgtaggaaggccttttatttctcagtacaatgtataaaattgtgatctctctcttcattctattctttttctctcaagagttccatttaatggaaataaaacggtataattaataattctctaggggggaaaaatgaagcaaatctcattggatatttttaaaggtctccacagagtttatgccatattggaattttgttgtataattctcnngcgaattc

SEQ ID NO: 279 - DNA, 1325 bp, Homo sapiens
gcagtagcagcgagcagcagagtccgcacgctccggcgaggggcagaagagcgcgagggagcgcggggcagcagaagcgagagccgagcgcggacccagccaggacccacagccctccccagctgcccaggaagagccccagccatggaacaccagctcctgtgctgcgaagtggaaaccatccgccgcgcgtaccccgatgccaacctcctcaacgaccgggtgctgcgggccatgctgaaggcggaggagacctgcgcgccctcggtgtcctacttcaaatgtgtgcagaaggaggtcctgccgtccatgcggaagatcgtcgccacctggatgctggaggtctgcgaggaacagaagtgcgaggaggaggtcttcccgctggccatgaactacctggaccgcttcctgtcgctggagcccgtgaaaaagagccgcctgcagctgctgggggccacttgcatgttcgtggcctctaagatgaaggagaccatccccctgacggccgagaagctgtgcatctacaccgacggctccatccggcccgaggagctgctgcaaatggagctgctcctggtgaacaagctcaagtggaacctggccgcaatgaccccgcacgatttcattgaacacttcctctccaaaatgccagaggcggaggagaacaaacagatcatccgcaaacacgcgcagaccttcgttgcctcttgtgccacagatgtgaagttcatttccaatccgccctccatggtggcagcggggagcgtggtggccgcagtgcaaggcctgaacctgaggagccccaacaacttcctgtcctactaccgcctcacacgcttcctctccagagtgatcaagtgtgacccagactgcctccgggcctgccaggagcagatcgaagccctgctggagtcaagcctgcgccaggcccagcagaacatggaccccaaggccgccgaggaggaggaagaggaggaggaggaggtggacctggcttgcacacccaccgacgtgcgggacgtggacatctgaggggcccaggcaggcgggcgccaccgccacccgcagcgagggcggagccggccccaggtgctccacatgacagtccctcctctccggagcattttgataccagaagggaaagcttcattctccttgttgttggttgttttttcctttgctctttcccccttccatctctgacttaagcaaaagaaaaagattacccaaaaactgtctttaaaagagagagagagaaaaaaaaaaaaaaaaaaaaaaaaaaaaaaaaaaaaaaaaaaaaaaaaaaaaaaaaaaaaaaaaaaaaa

SEQ ID NO: 280 - DNA, 2083 bp, Homo sapiens
cttgctcctcaggcagaggctgagtccgcacatcacctccaggccctcagaacacctgccccagccccaccatgctcatggcgtccaccacttccggtaaggcttgcccctccatgagtccggtgggcagagtgggtttgacgattcagggaagcccctctttctaaagacctccttcaccctcacctctgggtgtgtctctccaggctgccaatgagtggggaggggagcacagccccacttccccgccagggctggggctggggctggggctggggctgcccttccttctggactgcatgagcctggggtgtgtatccctcataacatggctttcctggagtcccctctgctaggagccaggaagtgggtgtccggatgggggcacgggaggcaggcctgagtccccctgcacagcaccctctctaaccaggccctcttcccgactcctgcccagctgtgcctgggcatccctctctgcccagcctgcccagcaacagcagccaggagaggccactggacacccgggacccgctgctagcccgggcggagctggcgctgctctccatagtctttgtggctgtggccctgagcaatggcctggtgctggcggccctagctcggcggggccggcggggccactgggcacccatacacgtcttcattggccacttgtgcctggccgacctggccgtggctctgttccaagtgctgccccagctggcctggaaggccaccgaccgcttccgtgggccagatgccctgtgtcgggccgtgaagtatctgcagatggtgggcatgtatgcctcctcctacatgatcctggccatgacgctggaccgccaccgtgccatctgccgtcccatgctggcgtaccgccatggaagtggggctcactggaaccggccggtgctagtggcttgggccttctcgctccttctcagcctgccccagctcttcatcttcgcccagcgcaacgtggaaggtggcagcggggtcactgactgctgggcctgctttgcggagccctggggccgtcgcacctatgtcacctggattgccctgatggtgttcgtggcacctaccctgggtatcgccgcctgccaggtgctcatcttccgggagattcatgccagtctggtgccagggccatcagagaggcctggggggcgccgcaggggacgccggacaggcagccccggtgagggagcccacgtgtcagcagctgtggccaagactgtgaggatgacgctagtgattgtggtcgtctatgtgctgtgctgggcacccttcttcctggtgcagctgtgggccgcgtgggacccggaggcacctctggaaggtgggtgtagccgtggctagggctgacggggccacttgggcttggccgcatgcccctgtgccccaccagccatcctgaacccaacctagatcctccacctccacaggggcgccctttgtgctactcatgttgctggccagcctcaacagctgcaccaacccctggatctatgcatctttcagcagcagcgtgtcctcagagctgcgaagcttgctctgctgtgcccggggacgcaccccacccagcctgggtccccaagatgagtcctgcaccaccgccagctcctccctggccaaggacacttcatcgtgaggagctgttgggtgtcttgcctctagaggctttgagaagctcagctgccttcctggggctggtcctgggagccactgggagggggacccgtggagaattggccagagcctgtggccccgaggctgggacactgtgtggccctggacaagccacagcccctgcctgggtctccacatccccagctgtatgaggagagcttcaggccccaggactgtgggggcccctcaggtcagctcactgagctgggtgtaggaggggctgcagcagaggcctgaggagtggcaggaaagagggagcaggtgcccccaggtgagacagcggtcccaggggcctgaaaaggaaggaccaggctggggccaggggaccttcctgtctccgcctttctaatccctccctcctcattctctccctaataaaaattggagctca

SEQ ID NO: 281 - DNA, 251 bp, Homo sapiens
cagcaccatcgcaaccagtgccagtactgccgcctcaaaaagtgcctcaaagtgggcatgagacgggaaggtatcggcctctcatttctccttccctcgtcctgggtcccggggtcctgggtacgtttggctagcctgctctgggtaaggacaagaagccccaagctcttctcttcgtattgcagcggaaaagggttttatactagaagcgagttctgcattggaacccagaccccaaatccgcatgcttt

SEQ ID NO: 282 - DNA, 2360 bp, Homo sapiens
gctacgcgggccacgctgctggctggcctgacctaggcgcgcggggtcgggcggccgcgcgggcgggctgagtgagcaagacaagacactcaagaagagcgagctgcgcctgggtcccggccaggcttgcacgcagaggcgggcggcagacggtgcccggcggaatctcctgagctccgccgcccagctctggtgccagcgcccagtggccgccgcttcgaaagtgactggtgcctcgccgcctcctctcggtgcgggaccatgaagctgctgccgtcggtggtgctgaagctctttctggctgcagttctctcggcactggtgactggcgagagcctggagcggcttcggagagggctagctgctggaaccagcaacccggaccctcccactgtatccacggaccagctgctacccctaggaggcggccgggaccggaaagtccgtgacttgcaagaggcagatctggaccttttgagagtcactttatcctccaagccacaagcactggccacaccaaacaaggaggagcacgggaaaagaaagaagaaaggcaaggggctagggaagaagagggacccatgtcttcggaaatacaaggacttctgcatccatggagaatgcaaatatgtgaaggagctccgggctccctcctgcatctgccacccgggttaccatggagagaggtgtcatgggctgagcctcccagtggaaaatcgcttatatacctatgaccacacaaccatcctggccgtggtggctgtggtgctgtcatctgtctgtctgctggtcatcgtggggcttctcatgtttaggtaccataggagaggaggttatgatgtggaaaatgaagagaaagtgaagttgggcatgactaattcccactgagagagacttgtgctcaaggaatcggctggggactgctacctctgagaagacacaaggtgatttcagactgcagaggggaaagacttccatctagtcacaaagactccttcgtccccagttgccgtctaggattgggcctcccataattgctttgccaaaataccagagccttcaagtgccaaacagagtatgtccgatggtatctgggtaagaagaaagcaaaagcaagggaccttcatgcccttctgattcccctccaccaaaccccacttcccctcataagtttgtttaaacacttatcttctggattagaatgccggttaaattccatatgctccaggatctttgactgaaaaaaaaaaagaagaagaagaaggagagcaagaaggaaagatttgtgaactggaagaaagcaacaaagattgagaagccatgtactcaagtaccaccaagggatctgccattgggaccctccagtgctggatttgatgagttaactgtgaaataccacaagcctgagaactgaattttgggacttctacccagatggaaaaataacaactatttttgttgttgttgtttgtaaatgcctcttaaattatatatttattttattctatgtatgttaatttatttagtttttaacaatctaacaataatatttcaagtgcctagactgttactttggcaatttcctggccctccactcctcatccccacaatctggcttagtgccacccacctttgccacaaagctaggatggttctgtgacccatctgtagtaatttattgtctgtctacatttctgcagatcttccgtggtcagagtgccactgcgggagctctgtatggtcaggatgtaggggttaacttggtcagagccactctatgagttggacttcagtcttgcctaggcgattttgtctaccatttgtgttttgaaagcccaaggtgctgatgtcaaagtgtaacagatatcagtgtctccccgtgtcctctccctgccaagtctcagaagaggttgggcttccatgcctgtagctttcctggtccctcacccccatggccccaggccacagcgtgggaactcactttcccttgtgtcaagacatttctctaactcctgccattcttctggtgctactccatgcaggggtcagtgcagcagaggacagtctggagaaggtattagcaaagcaaaaggctgagaaggaacagggaacattggagctgactgttcttggtaactgattacctgccaattgctaccgagaaggttggaggtggggaaggctttgtataatcccacccacctcaccaaaacgatgaaggtatgctgtcatggtcctttctggaagtttctggtgccatttctgaactgttacaacttgtatttccaaacctggttcatatttatactttgcaatccaaataaagataacccttattccataaaaaaaaaaaaaaaaaa

SEQ ID NO: 283 - DNA, 3001 bp, Homo sapiens
actttcctgccccttccccggccaagcccaactccggatctcgctctccaccggatctcacccgccacacccggacaggcggctggaggaggcgggcgtctaaaattctgggaagcagaacctggccggagccactagacagagccgggcctagcccagagacatggagagttgctacaacccaggtctggatggtattattgaatatgatgatttcaaattgaactcctccattgtggaacccaaggagccagccccagaaacagctgatggcccctacctggtgatcgtggaacagcctaagcagagaggcttccgatttcgatatggctgtgaaggcccctcccatggaggactgcccggtgcctccagtgagaagggccgaaagacctatcccactgtcaagatctgtaactacgagggaccagccaagatcgaggtggacctggtaacacacagtgacccacctcgtgctcatgcccacagtctggtgggcaagcaatgctcggagctggggatctgcgccgtttctgtggggcccaaggacatgactgcccaatttaacaacctgggtgtcctgcatgtgactaagaagaacatgatggggactatgatacaaaaacttcagaggcagcggctccgctctaggccccagggccttacggaggccgagcagcgggagctggagcaagaggccaaagaactgaagaaggtgatggatctgagtatagtgcggctgcgcttctctgccttccttagagccagtgatggctccttctccctgcccctgaagccagtcacctcccagcccatccatgatagcaaatctccgggggcatcaaacctgaagatttctcgaatggacaagacagcaggctctgtgcggggtggagatgaagtttatctgctttgtgacaaggtgcagaaagatgacattgaggttcggttctatgaggatgatgagaatggatggcaggcctttggggacttctctcccacagatgtgcataaacagtatgccattgtgttccggacacccccctatcacaagatgaagattgagcggcctgtaacagtgtttctgcaactgaaacgcaagcgaggaggggacgtgtctgattccaaacagttcacctattaccctctggtggaagacaaggaagaggtgcagcggaagcggaggaaggccttgcccaccttctcccagcccttcgggggtggctcccacatgggtggaggctctgggggtgcagccgggggctacggaggagctggaggaggtggcagcctcggtttcttcccctcctccctggcctacagcccctaccagtccggcgcgggccccatgcggtgctacccgggaggcgggggcggggcgcagatggccgccacggtgcccagcagggactccggggaggaagccgcggagccgagcgccccctccaggaccccccagtgcgagccgcaggccccggagatgctgcagcgagctcgagagtacaacgcgcgcctgttcggcctggcgcacgcagccccgagccctactcgactactgcgtcaccgcggacgccgcgcgctgctggcgggacagcgccacctgctgacggcgcaggacgagaacggagacacaccactgcacctagccatcatccacgggcagaccagtgtcattgagcagatagtctatgtcatccaccacgcccaggacctcggcgttgtcaacctcaccaaccacctgcaccagacgcccctgcacctggcggtgatcacggggcagacgagtgtggtgagctttctgctgcgggtaggtgcagacccagctctgctggatcggcatggagactcagccatgcatctggcgctgcgggcaggcgctggtgctcctgagctgctgcgtgcactgcttcagagtggagctcctgctgtgccccagctgttgcatatgcctgactttgagggactgtatccagtacacctggcggtccgagcccgaagccctgagtgcctggatctgctggtggacagtggggctgaagtggaggccacagagcggcaggggggacgaacagccttgcatctagccacagagatggaggagctggggttggtcacccatctggtcaccaagctccgggccaacgtgaacgctcgcacctttgcgggaaacacacccctgcacctggcagctggactggggtacccgaccctcacccgcctccttctgaaggctggtgctgacatccatgctgaaaacgaggagcccctgtgcccactgccttcaccccctacctctgatagcgactcggactctgaagggcctgagaaggacacccgaagcagcttccggggccacacgcctcttgacctcacttgcagcaccttggtgaagaccttgctgctaaatgctgctcagaacaccatggagccacccctgaccccgcccagcccagcagggccgggactgtcacttggtgatacagctctgcagaacctggagcagctgctagacgggccagaagcccagggcagctgggcagagctggcagagcgtctggggctgcgcagcctggtagacacgtaccgacagacaacctcacccagtggcagcctcctgcgcagctacgagctggctggcggggacctggcaggtctactggaggccctgtctgacatgggcctagaggagggagtgaggctgctgaggggtccagaaacccgagacaagctgcccagcacagaggtgaaggaagacagtgcgtacgggagccagtcagtggagcaggaggcagagaagctgggcccaccccctgagccaccaggagggctctcgcacgggcacccccagcctcaggtgactgacctgctgcctgcccccagcccccttcccggaccccctgtacagcgtccccacctatttcaaatcttatttaacaccccacacccacccctcagttgggacaaataaaggattctcatgggaaggggaggaccccgaattcct

SEQ ID NO: 284 - DNA, 209 bp, Homo sapiens
gccataaactaccctacactcaaaacaggcttcacgagaaaagttgatgtttaacattctgacaattatttctaacactatctgttctttcagtgatgtctccaagattaatgaaggaattggtgacaaaattggaatgttctttcagtcaatggcaacatttttcactgggtttatagtaggatttacacgtggttggaagctaaccc

SEQ ID NO: 285 - DNA, 502 bp, Homo sapiens
gtgagttacacttcttcctccccaccaggtgctctctgcagctctggaaaaatggtgtcctctttgttgtcccaccagggggcgccacctccagccccgccccagcctcatacccagttcttcagctcggccagcggtaactgaagcctcccagaatcctggatccgggcccctagtaccctctttcccagggacccaggagtcctgcctccagtcgcctgcacttgtaactgagagctggaggtcgtccatagcagcatagtgagagtgtttttgatgagggtatgcagagtgggggtgaccatgttcccacctggggcctcaggtgggccaaggcctacccactttagccagcgtcccctccagcagccatcagcaagccaacccactccaagccagggccccctttggtccttgcacttgaggtgctttgttcagggctgggtcaggagtggcagagacgatgtccaacaacctcagtactgggggaaaagtagcctgg

SEQ ID NO: 286 - DNA, 160 bp, Homo sapiens
gtgtgagaagactggctagtgtggaagcatagtgaacacactgattaggttatggtttaatgttacaacaactattttttaagaaaaacaagttttagaaatttggtttcaagtgtacatgtgtgaaaacaatattgtatactaccatagtgagccatga

SEQ ID NO: 287 - DNA, 269 bp, Homo sapiens
  modified_base (203): a, t, c, g, other or unknown
gttggctggatgggtcttatcaaaagcaaagaaagatgacatggatgaggaaatttcaatatacgatggaagatgggaaattgaagagttgaaagaaaaccaggtacctggtgacagaggactggtattaaaatctagagcaaagcatcatgcaatatctgctgtattagcaaaaccattcatttttgctgataaacccttgntagttcaatatgaagtaaattttcaagatggtattgattgtggaggtgcatacattaaactcctag

SEQ ID NO: 288 - DNA, 4206 bp, Homo sapiens
gtcgacaccacccaaaatagtgccgagcctcttggggggggaggggctgggagtgggggccctgagtgagagcaacgagggtgtgaccagcgccgcccggacccctagtcccctcccccgcacactcttcagctgtcgcagggggcctgagaggacagctgagggtcctggctgggaacgagctggggagggggagctggtggtgcctggggcatgaagaggcctcgctgagaccctcacaaacggtttgcacgtttccacacctcattttctcctcttcggtggcaggcactgtgcacccaattcctaaagcactcctggatttaatgttctgagagccacatagaacgaaagatgcaagaaatctgtttgctcttttttcagggggtggggtctttctgcccagatgtgggatcctctcctaaacccaggtcaacccagggcacgaggcagatggctggtgctgacatgttgaccatcactgctctcttccaaggactcacaaagagttaatgtccctggggctcagcctaggaagattccagtccctgcccaggcccaagatagttgctggcctgattcccctggcattcaggactggaaaggaggaggaggggcacactacgccggctcccatcctccccccaccccgcgtgcctgcttgggattcctgactctgtaccagcttcagagaacaggggtgggggtgggtgccattgggtgtggacagaaagctagtgaaacaagaccatgacaagtcactggccggctcagacgtgtttgtgtctctcttttcttagctcagtgagtactgggtatgtgtcacattgccaaatcccggatcacaagtctccatgaactgctggtgagctaggataataaaacccctgacatcaccattccagaagcttcacaagactgcatatataaggggctggctgtagctgcagctgaaggagctgaccagccagctgacccctcacactcacctagccaccatggacatcgccatccaccacccctggatccgccgccccttctttcctttccactcccccagccgcctctttgaccagttcttcggagagcacctgttggagtctgatcttttcccgacgtctacttccctgagtcccttctaccttcggccaccctccttcctgcgggcacccagctggtttgacactggactctcagaggtgagtctccccacagctaggacgggagagtccttactggaacctcctggaaacttctccatccattttcctttcctaccctgcctaaaccattttaggcacatgtgtgtccaaatgtgaagaaaaatgaggaggttgctagtgccttcctcccccatcacctgtttctatttgatagtcctctgtatcccatttattacattttttcatgcactgtcaagtttatcctccgtcccctaacttctctacaggatacccctttctggtttggttcatgacaatctgcagggaaagagctgccttcaaactcctttgcttatctcttccaacaccttggactcttgaccgattttaccatctcaggtttcagagccaggagagagccctgcctcatcctgagctgttcatccccatgggtattttctgcctttctattccctcttctatgattttctgggtttctcagggctacgacagggcgctggcctgggtccaatcaagccctacgaggaaacaatatagggacgcccatttgtcctaagagggtggaagaacagggtgaacaaataaggttgacagagctgtcacagataacactctggtttaaaaatattcaagtgtgagtaaacaggagctgagtgggcaagggctttggaaggacaagcaggaccagcagaacattccagattgggtgggtggaaaactggcaaagagacctgagccagaagaagaggcctttgtctcacagacaaaccacaaagccaggcattggagtcagagaggcagcagatgccaggcttgcacccatccttgcgactggtcccctgggtgatctgtcttcttctctgtccctgtaaataaagtttgggtctgatcaccatgagccttaggtatcactgtggtggctccctgaagcagacagctatgtttatttaaaaaggagattttttaagcagagaagagaaggatgaattacccggacagaaagcagctctgcagaataagacagcacctgtgtaatcagtatttttgccctctttctcccatcccattcccttaccttgctatttctagatgcgcctggagaaggacaggttctctgtcaacctggatgtgaagcacttctccccagaggaactcaaagttaaggtgttgggagatgtgattgaggtgcatggaaaacatgaagagcgccaggtatgtagcttgtttttttgttttctgctcattcattcagtgatactgtaatagtccaggtagtgctatcagctttggaggctggctacattccagtcccaagccataacagtcgggatcaggggttacaaatcaatgtctagaagactaagttaggatagacatattgctgttgttactattatggccagagatgtggcctttgatttgatcgccttagatgggatgatgggatgctgatgccccatttaagccagtggttctgaatctgggccacattagaatcaccaggggaactttcaaaaacctaatgctcgggcatcctccagaccaattagcatatgtgctgccgaagcgagcactactccagaccaattaaatcagcatttttaagggtgggacccaggcatcagcaatttttaaggtaattctaatctacagtcaaggttgagaaccactgattaggtatagggctgtcagacacctagttgctttgcataattacattaactacaggtaccctaaaagcacttgagttgtgacttctcttttagctgtgcaagaatccgtgtctcttctttagcccatcttaatgctgaactacttggtttgtctaaatttcagagctgtgctcagtctttaatcccctacagcccatgtggtaatcagttaacgagagcctgtttggctacatgcttgagagtcagcaggcatacgggttaaggtcatctactctttgggggagttctgacaaatggaacagcttgttatgactttataagagggctttaaaattgcttctcaccatttaacgatagctcagaacctgtgcgtcaaccagtacagtttgtcctcagtaatgtcctcaggctgtttcaattttgcttatatgatttaggtttgggtcatagtctccttggatggagtcatttttttttttttttaatttcagcagcagtcctattgttctggaaccttctgggacattcctgaagagtcaggacaatttcagggcttcctcagggactcagattctaaatgagattccaaattctgtaggcccagccaacattgatctaaacctttgggaaatacccctaaacatatctatgcctcagggtttgaaaaacaatgaagtgttggactgtttcagacttctcagattctcactggtaggagtgactacctaggcaatttcatcttagctgcaaccctgaaacgaagctctatttatttttcctatgttgtcatggcatttggtctcacctaaggggaaatcaggatgcctgagttctgggcaggtgataatagttcctgttcttatctctctgcctctttcctcattcttttgggttaggatgaacatggtttcatctccagggagttccacaggaaataccggatcccagctgatgtagaccctctcaccattacttcatccctgtcatctgatggggtcctcactgtgaatggaccaaggaaacaggtctctggccctgagcgcaccattcccatcacccgtgaagagaagcctgctgtcaccgcagcccccaagaaatagatgccctttcttgaattgcattttttaaaacaagaaagtttccccaccagtgaatgaaagtcttgtgactagtgctgaagcttattaatgctaagggcaggcccaaattatcaagctaataaaatatcattcagcaacagataactgtcttgtgtttgaatattccacacacttttaaataaatatacagataccacagatctatttatgattgcattatgatttagagggctccaaggattttagagt

SEQ ID NO: 289 - DNA, 494 bp, Homo sapiens
  modified_base (367): a, t, c, g, other or unknown
  modified_base (432): a, t, c, g, other or unknown
  modified_base (465): a, t, c, g, other or unknown
  modified_base (475): a, t, c, g, other or unknown
ttgtaaatgtagacagttttaattgtagtatcagaaactggtggggaggaaacaaattgtggtatattcatacaatggaaaactcttcagaaataagaaggaacaaaccactgaatcacacaacatggacaaatctcaaatcattatgctgatggaaagaaaccattcataagaatacacagtacatgacgccgctttcatgatgttctggaacaaagaaaactaacctatagtgatagaattcctatcaatggctgccaacaatcgggagtgaaaggaactgactgagcaggtatacaagagaaccttctggggtgatggaaatattctgaagcttgactggagtgttggttacatgggtatatcnatttatcaaaactcactgaattgtatatttaaagtaggaacattttattgtaaataaattacccnctataatgttcgttttaaaaatattagatacancgctggaaanccctgggtttacaaaaaat

SEQ ID NO: 290 - DNA, 264 bp, Homo sapiens
  modified_base (38): a, t, c, g, other or unknown
ggtactcaacactgagcagatctgttctttgagctaanaaccatgtgctgtaccaagagtttgctcctggctgctttgatgtcagtgctgctactccacctctgcggcgaatcagaagcaagcaactttgactgctgtcttggatacacagaccgtattcttcatcctaaatttattgtgggcttcacacggcagctggccaatgaaggctgtgacatcaatgctatgatctttcacacaaagaacaagttgtctgtgtgcgca

SEQ ID NO: 291 - DNA, 1113 bp, Homo sapiens
gaattccgggaacgaaagagaagctctatctcccctccaggagcccagctatgaactccttctccacaagcgccttcggtccagttgccttctccctggggctgctcctggtgttgcctgctgccttccctgccccagtacccccaggagaagattccaaagatgtagccgccccacacagacagccactcacctcttcagaacgaattgacaaacaaattcggtacatcctcgacggcatctcagccctgagaaaggagacatgtaacaagagtaacatgtgtgaaagcagcaaagaggcactggcagaaaacaacctgaaccttccaaagatggctgaaaaagatggatgcttccaatctggattcaatgaggagacttgcctggtgaaaatcatcactggtcttttggagtttgaggtatacctagagtacctccagaacagatttgagagtagtgaggaacaagccagagctgtgcagatgagtacaaaagtcctgatccagttcctgcagaaaaaggcaaagaatctagatgcaataaccacccctgacccaaccacaaatgccagcctgctgacgaagctgcaggcacagaaccagtggctgcaggacatgacaactcatctcattctgcgcagctttaaggagttcctgcagtccagcctgagggctcttcggcaaatgtagcatgggcacctcagattgttgttgttaatgggcattccttcttctggtcagaaacctgtccactgggcacagaacttatgttgttctctatggagaactaaaagtatgagcgttaggacactattttaattatttttaatttattaatatttaaatatgtgaagctgagttaatttatgtaagtcatatttatatttttaagaagtaccacttgaaacattttatgtattagttttgaaataataatggaaagtggctatgcagtttgaatatcctttgtttcagagccagatcatttcttggaaagtgtaggcttacctcaaataaatggctaacttatacatatttttaaagaaatatttatattgtatttatataatgtataaatggtttttataccaataaatggcattttaaaaaattc

SEQ ID NO: 292 - DNA, 2802 bp, Homo sapiens
  modified_base (2485): a, t, c, g, other or unknown
  modified_base (2531)..(2532): a, t, c, g, other or unknown
  modified_base (2762): a, t, c, g, other or unknown
caaattgtggctactaatttgccccctgaagatcaagatggctctggggatgactctgacaacttctccggctcaggtgcaggtgctttgcaagatatcaccttgtcacagcagaccccctccacttggaaggacacgcagctcctgacggctattcccacgtctccagaacccaccggcctggaggctacagctgcctccacctccaccctgccggctggagaggggcccaaggagggagaggctgtagtcctgccagaagtggagcctggcctcaccgcccgggagcaggaggccaccccccgacccagggagaccacacagctcccgaccactcatcaggcctcaacgaccacagccaccacggcccaggagcccgccacctcccacccccacagggacatgcagcctggccaccatgagacctcaacccctgcaggacccagccaagctgaccttcacactccccacacagaggatggaggtccttctgccaccgagagggctgctgaggatggagcctccagtcagctcccagcagcagagggctctggggagcaggacttcacctttgaaacctcgggggagaatacggctgtagtggccgtggagcctgaccgccggaaccagtccccagtggatcagggggccacgggggcctcacagggcctcctggacaggaaagaggtgctgggaggggtcattgccggaggcctcgtggggctcatctttgctgtgtgcctggtgggtttcatgctgtaccgcatgaagaagaaggacgaaggcagctactccttggaggagccgaaacaagccaacggcggggcctaccagaagcccaccaaacaggaggaattctatgcctgacgcgggagccatgcgccccctccgccctgccactcactaggcccccacttgcctcttccttgaagaactgcaggccctggcctcccctgccaccaggccacctccccagcattccagcccctctggtcgctcctgcccacggagtcgtgggtgtgctgggagctccactctgcttctctgacttctgcctggagacttagggcaccaggggtttctcgcataggacctttccaccacagccagcacctggcatcgcaccattctgactcggtttctccaaactgaagcagcctctccccaggtccagctctggaggggagggggatccgactgctttggacctaaatggcctcatgtggctggaagatcctgcgggtggggcttggggctcacacacctgtagcacttactggtaggaccaagcatcttgggggggtggccgctgagtggcaggggacaggagtcactttgtttcgtggggaggtctaatctagatatcgacttgtttttgcacatgtttcctctagttctttgttcatagcccagtagaccttgttacttctgaggtaagttaagtaagttgattcggtatccccccatcttgcttccctaatctatggtcgggagacagcatcagggttaagaagacttttttttttttttttaaactaggagaaccaaatctggaagccaaaatgtaggcttagtttgtgtgttgtctcttgagtttgtcgctcatgtgtgcaacagggtatggactatctgtctggtggccccgttctggtggtctgttggcaggctggccagtccaggctgccgtggggccgccgcctctttcaagcagtcgtgcctgtgtccatgcgctcagggccatgctgaggcctgggccgctgccacgttggagaagcccgtgtgagaagtgaatgctgggactcagccttcagacagagaggactgtagggagggcggcaggggcctggagatcctcctgcaggctcacgcccgtcctcctgtggcgccgtctccaggggctgcttcctcctggaaattgacgaggggtgtcttgggcagagctggctctgagcgcctccatccaaggccaggttctccgttagctcctgtggccccaccctgggccctgggctggaatcaggaatattttccaaagagtgatagtcttttgcttttggcaaaactctacttaatccaatgggtttttccctgtacagtagattttccaaatgtaataaactttaatataaagtagtctgtgaatgccactgccttcgcttcttgcctctgtgctgtgtgtgacgtgaccggacttttctgcaaacaccaacatgttgggaaacttggctcgaatctctgtgccttcgtctttcccatggggagggattctggttccagggtccctctgtgtatttgcttttttgttttggctgaaattctcctggaggtcggtaggttcagccaaggttttataaggctgatgtcaatttctgtgttgccaagctccaagcccatcttctaaatggcaaaggaaggtggatggccccagcacagcttgacctgaggctgtggtcacagcggaggtgtggagccgaggcctaccccncagacaccttggacatcctcctcccacccggctgcagaggccagannccagcccagggtcctgcacttacttgcttatttgacaacgtttcagcgactccgttggccactccgagagtgggccagtctgtggatcagagatgcaccaccaagccaagggaacctgtgtccggtattcgatactgcgactttctgcctggagtgtatgactgcacatgactcgggggtggggaaaggggtcggctgaccatgctcatctgctggtccgtgggacggtncccaagccagaggtgggttcatttgtgtaacgacaataaa

SEQ ID NO: 293 - DNA, 1743 bp, Homo sapiens
aaagaaggtaagggcagtgagaatgatgcatcttgcattccttgtgctgttgtgtctgccagtctgctctgcctatcctctgagtggggcagcaaaagaggaggactccaacaaggatcttgcccagcaatacctagaaaagtactacaacctcgaaaaggatgtgaaacagtttagaagaaaggacagtaatctcattgttaaaaaaatccaaggaatgcagaagttccttgggttggaggtgacagggaagctagacactgacactctggaggtgatgcgcaagcccaggtgtggagttcctgacgttggtcacttcagctcctttcctggcatgccgaagtggaggaaaacccaccttacatacaggattgtgaattatacaccagatttgccaagagatgctgttgattctgccattgagaaagctctgaaagtctgggaagaggtgactccactcacattctccaggctgtatgaaggagaggctgatataatgatctctttcgcagttaaagaacatggagacttttactcttttgatggcccaggacacagtttggctcatgcctacccacctggacctgggctttatggagatattcactttgatgatgatgaaaaatggacagaagatgcatcaggcaccaatttattcctcgttgctgctcatgaacttggccactccctggggctctttcactcagccaacactgaagctttgatgtacccactctacaactcattcacagagctcgcccagttccgcctttcgcaagatgatgtgaatggcattcagtctctctacggacctccccctgcctctactgaggaacccctggtgcccacaaaatctgttccttcgggatctgagatgccagccaagtgtgatcctgctttgtccttcgatgccatcagcactctgaggggagaatatctgttctttaaagacagatatttttggcgaagatcccactggaaccctgaacctgaatttcatttgatttctgcattttggccctctcttccatcatatttggatgctgcatatgaagttaacagcagggacaccgtttttatttttaaaggaaatgagttctgggccatcagaggaaatgaggtacaagcaggttatccaagaggcatccataccctgggttttcctccaaccataaggaaaattgatgcagctgtttctgacaaggaaaagaagaaaacatacttctttgcagcggacaaatactggagatttgatgaaaatagccagtccatggagcaaggcttccctagactaatagctgatgactttccaggagttgagcctaaggttgatgctgtattacaggcatttggatttttctacttcttcagtggatcatcacagtttgagtttgaccccaatgccaggatggtgacacacatattaaagagtaacagctggttacattgctaggcgagatagggggaagacagatatgggtgtttttaataaatctaataattattcatctaatgtattatgagccaaaatggttaatttttcctgcatgttctgtgactgaagaagatgagccttgcagatatctgcatgtgtcatgaagaatgtttctggaattcttcacttgcttttgaattgcactgaacagaattaagaaatactcatgtgcaataggtgagagaatgtattttcatagatgtgttattacttcctcaataaaaagttttattttgggcctgttcctt

SEQ ID NO: 294 - DNA, 343 bp, Homo sapiens
  modified_base (4): a, t, c, g, other or unknown
  modified_base (26): a, t, c, g, other or unknown
  modified_base (119): a, t, c, g, other or unknown
  modified_base (137): a, t, c, g, other or unknown
  modified_base (145): a, t, c, g, other or unknown
  modified_base (178): a, t, c, g, other or unknown
  modified_base (192): a, t, c, g, other or unknown
  modified_base (196)..(197): a, t, c, g, other or unknown
  modified_base (208): a, t, c, g, other or unknown
  modified_base (213): a, t, c, g, other or unknown
  modified_base (228): a, t, c, g, other or unknown
  modified_base (239): a, t, c, g, other or unknown
  modified_base (256): a, t, c, g, other or unknown
  modified_base (270): a, t, c, g, other or unknown
  modified_base (276): a, t, c, g, other or unknown
  modified_base (281): a, t, c, g, other or unknown
  modified_base (302): a, t, c, g, other or unknown
  modified_base (307): a, t, c, g, other or unknown
  modified_base (313): a, t, c, g, other or unknown
  modified_base (318): a, t, c, g, other or unknown
ttantcaatttgctatgtatatacgngtttattatatgcttattacaaaagaaaaagtcttttgccttattttagggcttccatgtaaaacctagttaaaatacaaaaagtaaattagngaaaaattctgcttaggnagtgaaanttgatagcaacttataagctgtatccttaaaancctagtcacagatntagnnttacgtaaagntaaantgataagcctacttnttggcaagaancaggttaggccacttangcagcatgtttctnccactntacanttacatcggcaggtccaaacnttaanccaccnttcgnttgacaaccttctatttttcaactt

SEQ ID NO: 295 - DNA, 410 bp, Homo sapiens
tttttttttcctgtttgtctgatttttattatttaaaaaaatggaaaaacaaaagtgcatttttcattcaataaatgttccatccttatttagttttgttgccgaaagtgaagtccatgactttagaatgatagcaatttatcaaccaaagaatccgtcttcacaccgtttcaataactgcagcaatttccttgaactgtctgtagaaattctgaaactgtggaatcgtcatttcaaagcacttggtctttacttggcctgaatgatctgccacttttagcatcactgcaacgtaaggatacttaagagatctgcaagtgtctgagctcacagccatacccagtttccactgaaaatctacaagctgggtggtgacatcggacttagcatccagcggcggcctcggtgcc

SEQ ID NO: 296 - DNA, 926 bp, Homo sapiens
ccagagaggggcaggcttgtcccctgacaggttgaagcaagtagacgcccaggagccccgggagggggctgcagtttccttccttccttctcggcagcgctccgcgcccccatcgcccctcctgcgctagcggaggtgatcgccgcggcgatgccggaggagggttcgggctgctcggtgcggcgcaggccctatgggtgcgtcctgcgggctgctttggtcccattggtcgcgggcttggtgatctgcctcgtggtgtgcatccagcgcttcgcacaggctcagcagcagctgccgctcgagtcacttgggtgggacgtagctgagctgcagctgaatcacacaggacctcagcaggaccccaggctatactggcaggggggcccagcactgggccgctccttcctgcatggaccagagctggacaaggggcagctacgtatccatcgtgatggcatctacatggtacacatccaggtgacgctggccatctgctcctccacgacggcctccaggcaccaccccaccaccctggccgtgggaatctgctctcccgcctcccgtagcatcagcctgctgcgtctcagcttccaccaaggttgtaccattgtctcccagcgcctgacgcccctggcccgaggggacacactctgcaccaacctcactgggacacttttgccttcccgaaacactgatgagaccttctttggagtgcagtgggtgcgcccctgaccactgctgctgattagggttttttaaattttattttattttatttaagttcaagagaaaaagtgtacacacaggggccacccggggttggggtgggagtgtggtggggggtagtttgtggcaggacaagagaaggcattgagctttttctttcattttcctattaaaaaatacaaaaatcaaaacaaaaaaaa

SEQ ID NO: 297 - DNA, 386 bp, Homo sapiens
  modified_base (28): a, t, c, g, other or unknown
  modified_base (314): a, t, c, g, other or unknown
  modified_base (342): a, t, c, g, other or unknown
  modified_base (366): a, t, c, g, other or unknown
  modified_base (383): a, t, c, g, other or unknown
gaggaagacgaggtggccctggggcccnctggacctttgatggaacagatgggaggaagaagaggaggacgtggaggacctggaaaaatggataaaggcgagcaccgtcagagcgcagagatcggccctactagatgcagagaccccgcagagctgcattgactaccagatttattttttaaaccagaaaatgttttaaatttattaattccatatttataatgttggccacaacattattgattattccttgtctgtactttagtatttttcaccatttgtgaaggaaacattaaaacaagtttaaatgggtnaaaaaaaaaacctcgtgcccgattcttnggccttcgagggccaatttccctnttggtgagtcctatttnaat

SEQ ID NO: 298 - DNA, 215 bp, Homo sapiens
ctttcacacaaagaaaaagttgtctgtgtgcgcaaatccaaaacagacttgggtgaaatatattgtgcgtctcctcagtaaaaaagtcaagaacatgtaaaaactgtggcttttctggaatggaattggacatagcccaagaacagaaagaaccttgctggggttggaggtttcacttgcacatcatggagggtttagtgcttatctaatttgtg

SEQ ID NO: 299 - DNA, 3328 bp, Homo sapiens
ccggccgcggagctcttgcgaccccgccaggacccgaacagagcccgggggcggcgggccggagccggggacgcgggcacacgcccgctcgcacaagccacggcggactctcccgaggcggaacctccacgccgagcgagggtcagtttgaaaaggaggatcgagctcactgtggagtatccatggagatgtggagccttgtcaccaacctctaactgcagaactgggatgtggagctggaagtgcctcctcttctgggctgtgctggtcacagcaacactctgcaccgctaggccgtccccgaccttgcctgaacaagatgctctcccctcctcggaggatgatgatgatgatgatgactcctcttcagaggagaaagaaacagataacaccaaaccaaaccccgtagctccatattggacatccccagaaaagatggaaaagaaattgcatgcagtgccggctgccaagacagtgaagttcaaatgcccttccagtgggaccccaaaccccacactgcgctggttgaaaaatggcaaagaattcaaacctgaccacagaattggaggctacaaggtccgttatgccacctggagcatcataatggactctgtggtgccctctgacaagggcaactacacctgcattgtggagaatgagtacggcagcatcaaccacacataccagctggatgtcgtggagcggtcccctcaccggcccatcctgcaagcagggttgcccgccaacaaaacagtggccctgggtagcaacgtggagttcatgtgtaaggtgtacagtgacccgcagccgcacatccagtggctaaagcacatcgaggtgaatgggagcaagattggcccagacaacctgccttatgtccagatcttgaagactgctggagttaataccaccgacaaagagatggaggtgcttcacttaagaaatgtctcctttgaggacgcaggggagtatacgtgcttggcgggtaactctatcggactctcccatcactctgcatggttgaccgttctggaagccctggaagagaggccggcagtgatgacctcgcccctgtacctggagatcatcatctattgcacaggggccttcctcatctcctgcatggtggggtcggtcatcgtctacaagatgaagagtggtaccaagaagagtgacttccacagccagatggctgtgcacaagctggccaagagcatccctctgcgcagacaggtaacagtgtctgctgactccagtgcatccatgaactctggggttcttctggttcggccatcacggctctcctccagtgggactcccatgctagcaggggtctctgagtatgagcttcccgaagaccttcgctgggagctgcctcgggacagactggtcttaggcaaacccctgggagagggctgctttgggcaggtggtgttggcagaggctatcgggctggacaaggacaaacccaaccgtgtgaccaaagtggctgtgaagatgttgaagtcggacgcaacagagaaagacttgtcagacctgatctcagaaatggagatgatgaagatgatcgggaagcataagaatatcatcaacctgctgggggcctgcacgcaggatggtcccttgtatgtcatcgtggagtatgcctccaagggcaacctgcgggagtacctgcaggcccggaggcccccagggctggaatactgctacaaccccagccacaacccagaggagcagctctcctccaaggacctggtgtcctgcgcctaccaggtggcccgaggcatggagtatctggcctccaagaagtgcatacaccgagacctggcagccaggaatgtcctggtgacagaggacaatgtgatgaagatagcagactttggcctcgcacgggacattcaccacatcgactactataaaaagacaaccaacggccgactgcctgtgaagtggatggcacccgaggcattatttgaccggatctacacccaccagagtgatgtgtggtctttcggggtgctcctgtgggagatcttcactctgggcggctccccataccccggtgtgcctgtggaggaacttttcaagctgctgaaggagggtcaccgcatggacaagcccagtaactgcaccaacgagctgtacatgatgatgcgggactgctggcatgcagtgccctcacagagacccaccttcaagcagctggtggaagacctggaccgcatcgtggccttgacctccaaccaggagtacctggacctgtccatgcccctggaccagtactcccccagctttcccgacacccggagctctacgtgctcctcaggggaggattccgtcttctctcatgagccgctgcccgaggagccctgcctgccccgacacccagcccagcttgccaatggcggactcaaacgccgctgactgccacccacacgccctccccagactccaccgtcagctgtaaccctcacccacagcccctgctgggcccaccacctgtccgtccctgtcccctttcctgctggcaggagccggctgcctaccaggggccttcctgtgtggcctgccttcaccccactcagctcacctctccctccacctcctctccacctgctggtgagaggtgcaaagaggcagatctttgctgccagccacttcatcccctccagatgttggaccaacacccctccctgccaccaggcatctgccggatgggcagagtggagcaatgaacaggcatgcaagtgagagcttcctgagctttctcctgtcggtttggtctgttttgccttcacccataagcccctcgcactctggtggcaggtgcttgtcctcagggctacagcagtagggaggtcagtgcttcgtgcctcgattgaaggtgacctctgccccagataggtggtgccagtggcttattaattccgatactagtttgctttgctgaccaaatgcctggtaccagaggatggtgaggcgaaggccaggttgggggcagtgttgtgccctggcccagccaaactgggggctctgtgggggctctgtatatagctatgaagaaaacacaaagtgtataaatctgagtatatatttacatgtctttttaaaagggtcgttaccagagatttacccatcgggtaagatgctcctggtggctgggaggcatcagttgctatatattaaaaacaaaaaagaaaaaaaaggaaaatgtttttaaaaaggtcatatattttttgctacttttgctgttttatttttttaaattatgttctaaacctattttcagtttaggtccctcaataaaaattgctgctgcttaaaaacc

SEQ ID NO: 300 - DNA, 337 bp, Homo sapiens
ccgttctggggcccaggaagtggggaagagtaggttctcggtacttaggacttgatcctgtggttggccactggcatgctgctgcccagctctacccctcccagggacctacccctcccagggaccgacccctggcccaagctccccttgctggcgggcgctgcgtgggccctgcacttgctgaggttccccatcatgggcaaggaagggaattcccacagccctccagtgtactgagggtactggcctagccatgtggaattccctaccctgactccttccccaaacccagggaaaagagctctcaattttttatttttaatttttgtttgaaata

SEQ ID NO: 301 - DNA, 443 bp, Homo sapiens
caaaggtccggaaaactggcacgaccatcgctggggtggtctataaggatggcatagttcttggagcagatacaagagcaactgaagggatggttgttgctgacaagaactgttcaaaaatacacttcatatctcctaatatttattgttgtggtgctgggacagctgcagacacagacatgacaacccagctcatttcttccaacctggagctccactccctctccactggccgtcttcccagagttgtgacagccaatcggatgctgaagcagatgcttttcaggtatcaaggttacattggtgcagccctagttttagggggagtagatgttactggacctcacctctacagcatctatcctcatggatcaactgataagttgccttatgtcaccatgggttctggctccttggcagcaatggctgtatttgaagataag

SEQ ID NO: 302 - DNA, 197 bp, Homo sapiens
  modified_base (130): a, t, c, g, other or unknown
  modified_base (144): a, t, c, g, other or unknown
tgagggcacatgtttatttagcagacaaggtggggctccatcagcggggtggcctggggagcagctgcatgggtggcactgtggggagggtctcccagctccctcaatggtgttcgggctggtgcggcantggcggcacctgtnactcagccgtcgatacactggtcgattgggacagggaagacgatgtggttttc

SEQ ID NO: 303 - DNA, 239 bp, Homo sapiens
gagaggcagcagcttgctcagcggacaaggatgctgggcgtgagggaccaaggcctgccctgcactcgggcctcctccagccagtgctgaccagggacttctgacctgctggccagccaggacctgtgtggggaggccctcctgctgccttggggtgacaatctcagctccaggctacagggagaccgggaggatcacagtgccagcatggatcctgacagtgatcaacctctgaacag

SEQ ID NO: 304 - DNA, 585 bp, Homo sapiens
ttttttttttttttttttttttttttttttttttttttttttttttttttttgttagtagaatcttttttattcagaaaaaaaaaaccccaaaaaacaaaagttttccaaccacacacgggagggatatgggtagggggaggtgtctgtccatccagccctggcccccagcccatgtggttttggcagcaataaggggtatggggtaatggcccaaaaaataaaatggtttgtgtgtgtatggggaggaaaggggtgcaaagctgtggggaggggtgaaggggaagggacagacgaggtcagtactgggaacgccgaagtgtggaggccatttcataacatttcttgttgatcaaaccaccgtggaaaccttctttgcccatcagcaggactagcgtcttgtcagtcttggtgacagtgacatttaaggttggggccccaccggtgctcttggtacgaagatccatgcaaatttccctcgttaggaagtgagtccgggtcactgtttattttttggctctattttttttttgggcggttttttttgtttgggttttttttttcgggggggggttcttttttgtat

SEQ ID NO: 305 - DNA, 518 bp, Homo sapiens
tgttctgtcacgtgaaatatttaagtatatagtatatttatactctagaacatgcacatttatatatatatgtatatgtatatatatatagtaactactttttatactccatacataacttgatatagaaagctgtttatttattaactgtaagtttattttttctacacagtaaaaacttgtactatgttaataacttgtcctatgtcaatttgtatatcatgaaacacttctcatcataatggaaggaaggtaattgcattcctgctcttccaaagctcctgcgtctgtttttaaagagcatggaaaaatactgcctagaaaatgcaaaatgaaataagagagagtagtttttcagctagtttgaaggaggacggttaacttgtatattccaccattcacatttgatgtacatgtgtagggaaagtaaaagtgttgatacataatcaagctaccgtggtgatgttgccactgttaaatgtacctggatatgttgttaacacgtgtctataatggaa

SEQ ID NO: 306 - DNA, 1639 bp, Homo sapiens
agcagagcacacaagcttctaggacaagagccaggaagaaaccaccggaaggaaccatctcactgtgtgtaaacatgacttccaagctggccgtggctctcttggcagccttcctgatttctgcagctctgtgtgaaggtgcagttttgccaaggagtgctaaagaacttagatgtcagtgcataaagacatactccaaacctttccaccccaaatttatcaaagaactgagagtgattgagagtggaccacactgcgccaacacagaaattattgtaaagctttctgatggaagagagctctgtctggaccccaaggaaaactgggtgcagagggttgtggagaagtttttgaagagggctgagaattcataaaaaaattcattctctgtggtatccaagaatcagtgaagatgccagtgaaacttcaagcaaatctacttcaacacttcatgtattgtgtgggtctgttgtagggttgccagatgcaatacaagattcctggttaaatttgaatttcagtaaacaatgaatagtttttcattgtaccatgaaatatccagaacatacttatatgtaaagtattatttatttgaatctacaaaaaacaacaaataatttttaaatataaggattttcctagatattgcacgggagaatatacaaatagcaaaattgagccaagggccaagagaatatccgaactttaatttcaggaattgaatgggtttgctagaatgtgatatttgaagcatcacataaaaatgatgggacaataaattttgccataaagtcaaatttagctggaaatcctggatttttttctgttaaatctggcaaccctagtctgctagccaggatccacaagtccttgttccactgtgccttggtttctcctttatttctaagtggaaaaagtattagccaccatcttacctcacagtgatgttgtgaggacatgtggaagcactttaagttttttcatcataacataaattattttcaagtgtaacttattaacctatttattatttatgtatttatttaagcatcaaatatttgtgcaagaatttggaaaaatagaagatgaatcattgattgaatagttataaagatgttatagtaaatttattttattttagatattaaatgatgttttattagataaatttcaatcagggtttttagattaaacaaagaaacaattgggtacccagttaaattttcatttcagataaacaacaaataattttttagtataagtacattattgtttatctgaaagttttaattgaactaacaatcctagtttgatactcccagtcttgtcattgccagctgtgttggtagtgctgtgttgaattacggaataatgagttagaactattaaaacagccaaaactccacagtcaatattagtaatttcttgctggttgaaacttgtttattatgtacaaatagattcttataatattatttaaatgactgcatttttaaatacaaggctttatatttttaactttaagatgtttttatgtgctctccaaattttttttactgtttctgattgtatggaaatataaaagtaaatatgaaacatttaaaatataatttgttgtcaaagtaaaaaaaaaaaaaaa

SEQ ID NO: 307 - DNA, 296 bp, Macaca mulatta
agatcatttacacaatgctggcctccttgatgaataaagatggggttctcatatccgagggccaaggcttcatgacaagggagtttctaaagagcctgcgaaagccttttggtgactttatggagcccaagtttgagtttgctgtgaagttcaatgcactggaattagatgacagcgacttggcaatatttattgctgtcattattctcagtggagaccgcccaggtttgctgaatgtgaagcccattgaagacattcaagacaacctgctacaagccctggagctccagctgaag

SEQ ID NO: 308 - DNA, 393 bp, Homo sapiens
  modified_base (148): a, t, c, g, other or unknown
  modified_base (325)..(326): a, t, c, g, other or unknown
gcgaccgctctcctacccggacaccgacgtcattctcatgtgcttctcggtggacagcccggactcgctggagaacatccccgagaagtgggtccccgaggtgaagcacttctgtcccaatgtgcccatcatcctggtggccaacaanaaagacctgcgcaggacgagcatgtccgcacagagctggcccgcatgaagcaggaacccgtgcgcacggatgacggccgcgcatggccgtgcgcatccaagcctacgactacctcgagtgctctgccaagaccaaggaaggcgtgcgcgaggtcttcgagacggccacgcgcgccgnntgcaagaaagcgttacggctcccagaacggctgcatcaactgctgcaaggtgctatgagggccgcgc

SEQ ID NO: 309 - DNA, 560 bp, Homo sapiens
cggtctcgtgggcagaggaacaaccaggaacttgggctcagtctccaccccacagtggggcggatccgtcccggataagacccgctgtctggccctgagtagggtgtgacctccgcagccgcagaggaggagcgcagccggcctcgaagaacttctgcttgggtggctgaactctgatcttgacctagagcatggcatgcaaccaaaggaggtactgtcaaagctgcttcaggattcaatgccatggaagatgcccagaccctgaggaaggccatgaaagggctcggcaccgatgaagacgccattattagcgtccttgcctaccgcaacaccgcccagcgccaggagatcaggacagcctacaagagcaccatcggcagggacttgatagacgacctgaagtcagaactgagtggcacttcgagcaggtgattgtggggatgatgacgcccacgtgctgtatgacgtgcaagagctgcgaagggccatgaagggagccggactgatgagggctgctaattgagatcttggcttccggacccttaggagatcggcgcata

SEQ ID NO: 310 - DNA, 1050 bp, Homo sapiens
ctcgccagctcttccgctcctctcacagccgccagacccgcctgctgagccccatggcccgcgctgctctctccgccgcccccagcaatccccggctcctgcgagtggcactgctgctcctgctcctggtagccgctggccggcgcgcagcaggagcgtccgtggccactgaactgcgctgccagtgcttgcagaccctgcagggaattcaccccaagaacatccaaagtgtgaacgtgaagtcccccggaccccactgcgcccaaaccgaagtcatagccacactcaagaatgggcggaaagcttgcctcaatcctgcatcccccatagttaagaaaatcatcgaaaagatgctgaacagtgacaaatccaactgaccagaagggaggaggaagctcactggtggctgttcctgaaggaggccctgcccttataggaacagaagaggaaagagagacacagctgcagaggccacctggattgtgcctaatgtgtttgagcatcgcttaggagaagtcttctatttatttatttattcattagttttgaagattctatgttaatattttaggtgtaaaataattaagggtatgattaactctacctgcacactgtcctattatattcattctttttgaaatgtcaaccccaagttagttcaatctggattcatatttaatttgaaggtagaatgttttcaaatgttctccagtcattatgttaatatttctgaggagcctgcaacatgccagccactgtgatagaggctggcggatccaagcaaatggccaatgagatcattgtgaaggcaggggaatgtatgtgcacatctgttttgtaactgtttagatgaatgtcagttgttatttattgaaatgatttcacagtgtgtggtcaacatttctcatgttgaaactttaagaactaaaatgttctaaatatcccttggacattttatgtctttcttgtaaggcatactgccttgtttaatggtagttttacagtgtttctggcttagaacaaaggggcttaattattgatgttttcgga

SEQ ID NO: 311 - DNA, 3448 bp, Homo sapiens
gactgggtcatccctccaatcaacttgccagaaaactccaggggaccttttcctcaagagcttgtcaggatcaggtctgatagagataaaaacctttcactgcggtacagtgtaactgggccaggagctgaccagcctccaactggtatcttcattctcaaccccatctcgggtcagctgtcggtgacaaagcccctggatcgcgagcagatagcccggtttcatttgagggcacatgcagtagatattaatggaaatcaagtggagaaccccattgacattgtcatcaatgttattgacatgaatgacaacagacctgagttcttacaccaggtttggaatgggacagttcctgagggatcaaagcctggaacatatgtgatgaccgtaacagcaattgatgctgacgatcccaatgccctcaatgggatgttgaggtacagaatcgtgtctcaggctccaagcaccccttcacccaacatgtttacaatcaacaatgagactggtgacatcatcacagtggcagctggacttgatcgagaaaaagtgcaacagtatacgttaataattcaagctacagacatggaaggcaatcccacatatggcctttcaaacacagccacggccgtcatcacagtgacagatgtcaatgacaatcctccagagtttactgccatgacgttttatggtgaagttcctgagaacagggtagacatcatagtagctaatctaactgtgaccgataaggatcaaccccatacaccagcctggaacgcagtgtacagaatcagtggcggagatcctactggacggttcgccatccagaccgacccaaacagcaacgacgggttagtcaccgtggtcaaaccaatcgactttgaaacaaataggatgtttgtccttactgttgctgcagaaaatcaagtgccattagccaagggaattcagcacccgcctcagtcaactgcaaccgtgtctgttacagttattgacgtaaatgaaaacccttattttgcccccaatcctaagatcattcgccaagaagaagggcttcatgccggtaccatgttgacaacattcactgctcaggacccagatcgatatatgcagcaaaatattagatacactaaattatctgatcctgccaattggctaaaaatagatcctgtgaatggacaaataactacaattgctgttttggaccgagaatcaccaaatgtgaaaaacaatatatataatgctactttccttgcttctgacaatggaattcctcctatgagtggaacaggaacgctgcagatctatttacttgatattaatgacaatgcccctcaagtgttacctcaagaggcagagacttgcgaaactccagaccccaattcaattaatattacagcacttgattatgacattgatccaaatgctggaccatttgcttttgatcttcctttatctccagtgactattaagagaaattggaccatcactcggcttaatggtgattttgctcagcttaatttaaagataaaatttcttgaagctggtatctatgaagttcccatcataatcacagattcgggtaatcctcccaaatcaaatatttccatcctgcgcgtgaaggtttgccagtgtgactccaacggggactgcacagatgtggacaggattgtgggtgcggggcttggcaccggtgccatcattgccatcctgctctgcatcatcatcctgcttatccttgtgctgatgtttgtggtatggatgaaacgccgggataaagaacgccaggccaaacaacttttaattgatccagaagatgatgtaagagataatattttaaaatatgatgaagaaggtggaggagaagaagaccaggactatgacttgagccagctgcagcagcctgacactgtggagcctgatgccatcaagcctgtgggaatccgacgaatggatgaaagacccatccacgccgagccccagtatccggtccgatctgcagccccacaccctggagacattggggacttcattaatgagggccttaaagcggctgacaatgaccccacagctccaccatatgactccctgttagtgtttgactatgaaggcagtggctccactgctgggtccttgagctcccttaattcctcaagtagtggtggtgagcaggactatgattacctgaacgactgggggccacggttcaagaaacttgctgacatgtatggtggaggtgatgactgaacttcagggtgaacttggtttttggacaagtacaaacaatttcaactgatattcccaaaaagcattcagaagctaggctttaactttgtagtctactagcacagtgcctgctggaggctttggcataggctgcaaaccaatttgggctcagagggaatatcagtgatccatactgtttggaaaaacactgagctcagttacacttgaattttacagtacagaagcactgggattttatgtgcctttttgtacctttttcagattggaattagttttctgtttaaggctttaatggtactgatttctgaaacgataagtaaaagacaaaatattttgtggtgggagcagtaagttaaaccatgatatgcttcaacacgcttttgttacattgcatttgcttttattaaaatacaaaattaaacaaacaaaaaaactcatggagcgattttattatcttgggggatgagaccatgagattggaaaatgtacattacttctagttttagactttagtttgttttttttttttttcactaaaatcttaaaacttactcagctggttgcaaataaagggagttttcatatcaccaatttgtagcaaaattgaattttttcataaactagaatgttagacacattttggtcttaatccatgtacacctttttatttctgtatttttccacttcactgtaaaaatagtatgtgtacataatgttttattggcatacgtctatggagaagtgcagaaacttcagaacatgtgtatgtattatttggactatggattcaggttttttgcatgtttatatctttcgttatggataaagtatttacaaaacagtgacatttgattcaattgttgagctgtagttagaatactcaatttttaatttttttaatttttttattttttattttctttttggtttggggagggagaaaagttcttagcacaaatgttttacataatttgtaccaaaaaaaaaaaaaaaggaaaggaaagaaaggggtggcctgacactggtggcactactaagtgtgtgtttttttaaaaaaaaaatggaaaaaaaaaagcctttaaactggagagacttctgacaacagctttgcctctgtattgtgtaccagaatataaatgatacacctctgaccccagcgttctgaataaaatgctaattttggataacaaaaaaaggggaattc

SEQ ID NO: 312 - DNA, 231 bp, Homo sapiens
cacacagtcaagctttaaagaaagtgtttgctgaaaataaagaaatccagaaattggcagagcagtttgtcctcctcaatctggtttatgaaacaactgacaaacacctttctcctgatggccagtatgtccccaggattatgtttgttgacccatctctgacagttagagccgatatcactggaagatattcaaaccgtctctatgcttacgaacctgcagatacagctc

SEQ ID NO: 313 - DNA, 86 bp, Homo sapiens
ggtgtgttttattttcattattcatacaaataattttctataatatcccggggcaaaccggagaatttggcagtccgattgggggg

SEQ ID NO: 314 - DNA, 1086 bp, Homo sapiens
atggatctgcacctcttcgactacgccgagccaggcaacttctcggacatcagctggccatgcaacagcagcgactgcatcgtggtggacacggtgatgtgtcccaacatgcccaacaaaagcgtcctgctctacacgctctccttcatttacattttcatcttcgtcatcggcatgattgccaactccgtggtggtctgggtgaatatccaggccaagaccacaggctatgacacgcactgctacatcttgaacctggccattgccgacctgtgggttgtcctcaccatcccagtctgggtggtcagtctcgtgcagcacaaccagtggcccatgggcgagctcacgtgcaaagtcacacacctcatcttctccatcaacctcttcagcggcattttcttcctcacgtgcatgagcgtggaccgctacctctccatcacctacttcaccaacacccccagcagcaggaagaagatggtacgccgtgtcgtctgcatcctggtgtggctgctggccttctgcgtgtctctgcctgacacctactacctgaagaccgtcacgtctgcgtccaacaatgagacctactgccggtccttctaccccgagcacagcatcaaggagtggctgatcggcatggagctggtctccgttgtcttgggctttgccgttcccttctccattatcgctgtcttctacttcctgctggccagagccatctcggcgtccagtgaccaggagaagcacagcagccggaagatcatcttctcctacgtggtggtcttccttgtctgctggctgccctaccacgtggcggtgctgctggacatcttctccatcctgcactacatccctttcacctgccggctggagcacgccctcttcacggccctgcatgtcacacagtgcctgtcgctggtgcactgctgcgtcaaccctgtcctctacagcttcatcaatcgcaactacaggtacgagctgatgaaggccttcatcttcaagtactcggccaaaacagggctcaccaagctcatcgatgcctccagagtgtcggagacggagtactccgccttggagcaaaacgccaag

SEQ ID NO: 315 - DNA, 2360 bp, Homo sapiens; identical to SEQ ID NO: 282

SEQ ID NO: 316 - DNA, 5067 bp, Homo sapiens
ctcctccccatcctctccctctgtccctctgtccctctgaccctgcactgtcccagcaccatgggacccacctcaggtcccagcctgctgctcctgctactaacccacctccccctggctctggggagtcccatgtactctatcatcacccccaacatcttgcggctggagagcgaggagaccatggtgctggaggcccacgacgcgcaaggggatgttccagtcactgttactgtccacgacttcccaggcaaaaaactagtgctgtccagtgagaagactgtgctgacccctgccaccaaccacatgggcaacgtcaccttcacgatcccagccaacagggagttcaagtcagaaaaggggcgcaacaagttcgtgaccgtgcaggccaccttcgggacccaagtggtggagaaggtggtgctggtcagcctgcagagcgggtacctcttcatccagacagacaagaccatctacacccctggctccacagttctctatcggatcttcaccgtcaaccacaagctgctacccgtgggccggacggtcatggtcaacattgagaacccggaaggcatcccggtcaagcaggactccttgtcttctcagaaccagcttggcgtcttgcccttgtcttgggacattccggaactcgtcaacatgggccagtggaagatccgagcctactatgaaaactcaccacagcaggtcttctccactgagtttgaggtgaaggagtacgtgctgcccagtttcgaggtcatagtggagcctacagagaaattctactacatctataacgagaagggcctggaggtcaccatcaccgccaggttcctctacgggaagaaagtggagggaactgcctttgtcatcttcgggatccaggatggcgaacagaggatttccctgcctgaatccctcaagcgcattccgattgaggatggctcgggggaggttgtgctgagccggaaggtactgctggacggggtgcagaacctccgagcagaagacctggtggggaagtctttgtacgtgtctgccaccgtcatcttgcactcaggcagtgacatggtgcaggcagagcgcagcgggatccccatcgtgacctctccctaccagatccacttcaccaagacacccaagtacttcaaaccaggaatgccctttgacctcatggtgttcgtgacgaaccctgatggctctccagcctaccgagtccccgtggcagtccagggcgaggacactgtgcagtctctaacccagggagatggcgtggccaaactcagcatcaacacacaccccagccagaagcccttgagcatcacggtgcgcacgaagaagcaggagctctcggaggcagagcaggctaccaggaccatgcaggctctgccctacagcaccgtgggcaactccaacaattacctgcatctctcagtgctacgtacagagctcagacccggggagaccctcaacgtcaacttcctcctgcgaatggaccgcgcccacgaggccaagatccgctactacacctacctgatcatgaacaagggcaggctgttgaaggcgggacgccaggtgcgagagcccggccaggacctggtggtgctgcccctgtccatcaccaccgacttcatcccttccttccgcctggtggcgtactacacgctgatcggtgccagcggccagagggaggtggtggccgactccgtgtgggtggacgtcaaggactcctgcgtgggctcgctggtggtaaaaagcggccagtcagaagaccggcagcctgtacctgggcagcagatgaccctgaagatagagggtgaccacggggcccgggtggtactggtggccgtggacaagggcgtgttcgtgctgaataagaagaacaaactgacgcagagtaagatctgggacgtggtggagaaggcagacatcggctgcaccccgggcagtgggaaggattacgccggtgtcttctccgacgcagggctgaccttcacgagcagcagtggccagcagaccgcccagagggcagaacttcagtgcccgcagccagccgcccgccgacgccgttccgtgcagctcacggagaagcgaatggacaaagtcggcaagtaccccaaggagctgcgcaagtgctgcgaggacggcatgcgggagaaccccatgaggttctcgtgccagcgccggacccgtttcatctccctgggcgaggcgtgcaagaaggtcttcctggactgctgcaactacatcacagagctgcggcggcagcacgcgcgggccagccacctgggcctggccaggagtaacctggatgaggacatcattgcagaagagaacatcgtttcccgaagtgagttcccagagagctggctgtggaacgttgaggacttgaaagagccaccgaaaaatggaatctctacgaagctcatgaatatatttttgaaagactccatcaccacgtgggagattctggctgtcagcatgtcggacaagaaagggatctgtgtggcagaccccttcgaggtcacagtaatgcaggacttcttcatcgacctgcggctaccctactctgttgttcgaaacgagcaggtggaaatccgagccgttctctacaattaccggcagaaccaagagctcaaggtgagggtggaactactccacaatccagccttctgcagcctggccaccaccaagaggcgtcaccagcagaccgtaaccatcccccccaagtcctcgttgtccgttccatatgtcatcgtgccgctaaagaccggcctgcaggaagtggaagtcaaggctgccgtctaccatcatttcatcagtgacggtgtcaggaagtccctgaaggtcgtgccggaaggaatcagaatgaacaaaactgtggctgttcgcaccctggatccagaacgcctgggccgtgaaggagtgcagaaagaggacatcccacctgcagacctcagtgaccaagtcccggacaccgagtctgagaccagaattctcctgcaagggaccccagtggcccagatgacagaggatgccgtcgacgcggaacggctgaagcacctcattgtgaccccctcgggctgcggggaacagaacatgatcggcatgacgcccacggtcatcgctgtgcattacctggatgaaacggagcagtgggagaagttcggcctagagaagcggcagggggccttggagctcatcaagaaggggtacacccagcagctggccttcagacaacccagctctgcctttgcggccttcgtgaaacgggcacccagcacctggctgaccgcctacgtggtcaaggtcttctctctggctgtcaacctcatcgccatcgactcccaagtcctctgcggggctgttaaatggctgatcctggagaagcagaagcccgacggggtcttccaggaggatgcgcccgtgatacaccaagaaatgattggtggattacggaacaacaacgagaaagacatggccctcacggcctttgttctcatctcgctgcaggaggctaaagatatttgcgaggagcaggtcaacagcctgccaggcagcatcactaaagcaggagacttccttgaagccaactacatgaacctacagagatcctacactgtggccattgctggctatgctctggcccagatgggcaggctgaaggggcctcttcttaacaaatttctgaccacagccaaagataagaaccgctgggaggaccctggtaagcagctctacaacgtggaggccacatcctatgccctcttggccctactgcagctaaaagactttgactttgtgcctcccgtcgtgcgttggctcaatgaacagagatactacggtggtggctatggctctacccaggccaccttcatggtgttccaagccttggctcaataccaaaaggacgcccctgaccaccaggaactgaaccttgatgtgtccctccaactgcccagccgcagctccaagatcacccaccgtatccactgggaatctgccagcctcctgcgatcagaagagaccaaggaaaatgagggtttcacagtcacagctgaaggaaaaggccaaggcaccttgtcggtggtgacaatgtaccatgctaaggccaaagatcaactcacctgtaataaattcgacctcaaggtcaccataaaaccagcaccggaaacagaaaagaggcctcaggatgccaagaacactatgatccttgagatctgtaccaggtaccggggagaccaggatgccactatgtctatattggacatatccatgatgactggctttgctccagacacagatgacctgaagcagctggccaatggtgttgacagatacatctccaagtatgagctggacaaagccttctccgataggaacaccctcatcatctacctggacaaggtctcacactctgaggatgactgtctagctttcaaagttcaccaatactttaatgtagagcttatccagcctggagcagtcaaggtctacgcctattacaacctggaggaaagctgtacccggttctaccatccggaaaaggaggatggaaagctgaacaagctctgccgtgatgaactgtgccgctgtgctgaggagaattgcttcatacaaaagtcggatgacaaggtcaccctggaagaacggctggacaaggcctgtgagccaggagtggactatgtgtacaagacccgactggtcaaggttcagctgtccaatgactttgacgagtacatcatggccattgagcagaccatcaagtcaggctcggatgaggtgcaggttggacagcagcgcacgttcatcagccccatcaagtgcagagaagccctgaagctggaggagaagaaacactacctcatgtggggtctctcctccgatttctggggagagaagcccaacctcagctacatcatcgggaaggacacttgggtggagcactggcctgaggaggacgaatgccaagacgaagagaaccagaaacaatgccaggacctcggcgccttcaccgagagcatggttgtctttgggtgccccaactgaccacacccccattcc

SEQ ID NO: 317 - DNA, 576 bp, Homo sapiens
  modified_base (425): a, t, c, g, other or unknown
aaagttttgccagtagatcttggattacaataccaagaaaggcagggtctctgaaacaacgcacaatatccccggctgagagcactgcactccttcaaggtagaaagtcaagagaaaagcatcataatatattacctaagactttggcaaatgacaaacattcccataaacctcacccagtagagacatctcagccctctgataaaacagtactggatacaagttatgctttgataggtgaaacagtaaataattatagatctacaaaatatgaaatgtattccaagaatgcagaaaaaccatctagaagcaaaaggactataaaacaaaaacaggagaagaaattcatggctaaaccagctgaagaacagcttgatgtgggacagtctaaagatgaaaacatacatacatcacatattacccangacgaatttcaaagaaattcagacagaaaatatggaagagcctgaagagattgggaaatgattgtggttccaaaaaacagatgccacctgtgggaagccagaaaggtagcactgaaaagattgggggattcttaaaggagcgcttttcagt

SEQ ID NO: 318 - DNA, 236 bp, Homo sapiens
ctcctctggcagaacctcggctctcaggaggtccttgttccagggaacagctgcttctctggggctgggctctactccctgcagcccctcgcactacccagctggaaccagggacaacgcctgagtccaaccctcgtgtctattttccagaaaacgggcaatgctgtgagagccattggaagactgtcctctatggcaatgatctcagggctcagtggcaggaaatcctcaacagg

SEQ ID NO: 319 - DNA, 2184 bp, Homo sapiens
cggagaggcggtcgggatccgctgcgcgagctgtctcggtcccacgtgtgcgagttgctacgatggaagttaaagggaaaaagcaattcacaggaaagagtacaaagacagcacaagaaaaaaacagatttcataaaaatagtgattctggttcttcaaagacatttccaacaaggaaagttgctaaagaaggtggacctaaagtcacatctaggaactttgagaaaagtatcacaaaacttgggaaaaagggtgtaaagcagttcaagaataagcagcaaggggacaaatcaccaaagaacaaattccagccggcaaataaattcaacaagaagagaaaattccagccagatggtagaagcgatgaatcagcagccaagaagcccaaatgggatgacttcaaaaagaagaagaaagaactgaagcaaagcagacaactcagtgataaaaccaactatgacattgttgttcgggcaaagcagatgtgggagattttaagaagaaaagactgtgacaaagaaaaaagagtaaagttaatgagtgatttgcagaagttgattcaagggaaaattaaaactattgcatttgcacacgattcaactcgtgtgatccagtgttacattcagtatggtaatgaagaacagagaaaacaggcttttgaagaattgcgagatgatttggttgagttaagtaaagccaaatattcgagaaatattgttaagaaatttctcatgtatggaagtaaaccacagattgcagagataatcagaagttttaaaggccacgtgaggaagatgctgcggcatgcggaagcatgcagccatcgtggagtacgcatacaatgacaaagccattttggagcagaggaacatgctgacggaagagctctatgggaacacatttcagctttacaagtcagcagatcacccaactctggacaaagtgttagaggtacagccagaaaaattagaacttattatggatgaaatgaaacagattctaactccaatggcccaaaaggaagctgtgattaagcactcattggtgcataaagtattcttggacttttttacctatgcaccccccaaactcagatcagaaatgattgaagccatccgcgaagcggtggtctacctggcacacacacacgatggcgccagagtggccatgcactgcctgtggcatggcacgcccaaggacaggaaagtgattgtgaaaacaatgaagacttatgttgaaaaggtggctaatggccaatactcccatttggttttactggcggcatttgattgtattgatgatactaagcttgtgaagcagataatcatatcagaaattatcagttcattgcctagcatagtaaatgacaaatatggaaggaaggtcctattgtacttactaagccccagagatcctgcacatacagtacgagaaatcattgaagttctgcaaaaaggagatggaaatgcacacagtaagaaagatacagaggtccgcagacgggagctcctagaatccatttctccagctttgttaagctacctgcaagaacatgcccaagaagtggtgctagataagtctgcgtgtgtgttggtgtctgacattctgggatctgccactggagacgttcagcctaccatgaatgccatcgccagcttggcagcaacaggactgcatcctggtggcaaggacggagagcttcacattgcagaacatcctgcaggacatctagttctgaagtggttaatagagcaagataaaaagatgaaagaaaatgggagagaaggttgttttgcaaaaacacttgtagagcatgttggtatgaagaacctgaagtcctgggctagtgtaaatcgaggtgccattattctttctagcctcctccagagttgtgacctggaagttgcaaacaaagtcaaagctgcactgaaaagcttgattcctacattggaaaaaaccaaaagcaccagcaaaggaatagaaattctacttgaaaaactgagcacataggtggaaagagttaagagcaagatggaatgattttttctgttctctgttctgtttcccaatgcagaaaagaaggggtagggtccaccatactggtaattggggtactctgtatatgtgtttcttctttgtatacgaatctatttatataaattgtttttttaaatggtctttttt

SEQ ID NO: 320 - DNA, 1970 bp, Homo sapiens
atattggagtagcaagaggctgggaagccatcacttaccttgcactgagaaagaagacaaaggccagtatgcacagctttcctccactgctgctgctgctgttctggggtgtggtgtctcacagcttcccagcgactctagaaacacaagagcaagatgtggacttagtccagaaatacctggaaaaatactacaacctgaagaatgatgggaggcaagttgaaaagcggagaaatagtggcccagtggttgaaaaattgaagcaaatgcaggaattctttgggctgaaagtgactgggaaaccagatgctgaaaccctgaaggtgatgaagcagcccagatgtggagtgcctgatgtggctcagtttgtcctcactgaggggaaccctcgctgggagcaaacacatctgacctacaggattgaaaattacacgccagatttgccaagagcagatgtggaccatgccattgagaaagccttccaactctggagtaatgtcacacctctgacattcaccaaggtctctgagggtcaagcagacatcatgatatcttttgtcaggggagatcatcgggacaactctccttttgatggacctggaggaaatcttgctcatgcttttcaaccaggcccaggtattggaggggatgctcattttgatgaagatgaaaggtggaccaacaatttcagagagtacaacttacatcgtgttgcggctcatgaactcggccattctcttggactctcccattctactgatatcggggctttgatgtaccctagctacaccttcagtggtgatgttcagctagctcaggatgacattgatggcatccaagccatatatggacgttcccaaaatcctgtccagcccatcggcccacaaaccccaaaagcatgtgacagtaagctaacctttgatgctataactacgattcggggagaagtgatgttctttaaagacagattctacatgcgcacaaatcccttctacccggaagttgagctcaatttcatttctgttttctggccacaactgccaaatgggcttgaagctgcttacgaatttgccgacagagatgaagtccggtttttcaaagggaataagtactgggctgttcagggacagaatgtgctacacggataccccaaggacatctacagctcctttggcttccctagaactgtgaagcatatcgatgctgctctttctgaggaaaacactggaaaaacctacttctttgttgctaacaaatactggaggtatgatgaatataaacgatctatggatccaggttatcccaaaatgatagcacatgactttcctggaattggccacaaagttgatgcagttttcatgaaagatggatttttctatttctttcatggaacaagacaatacaaatttgatcctaaaacgaagagaattttgactctccagaaagctaatagctggttcaactgcaggaaaaattgaacattactaatttgaatggaaaacacatggtgtgagtccaaagaaggtgttttcctgaagaactgtctattttctcagtcatttttaacctctagagtcactgatacacagaatataatcttatttatacctcagtttgcatatttttttactatttagaatgtagccctttttgtactgatataatttagttccacaaatggtgggtacaaaaagtcaagtttgtggcttatggattcatataggccagagttgcaaagatcttttccagagtatgcaactctgacgttgatcccagagagcagcttcagtgacaaacatatcctttcaagacagaaagagacaggagacatgagtctttgccggaggaaaagcagctcaagaacacatgtgcagtcactggtgtcaccctggataggcaagggataactcttctaacacaaaataagtgttttatgtttggaataaagtcaaccttgtttctactgtttt

SEQ ID NO: 321 - DNA, 508 bp, Homo sapiens
  modified_base (462): a, t, c, g, other or unknown
  modified_base (467): a, t, c, g, other or unknown
  modified_base (477): a, t, c, g, other or unknown
  modified_base (489): a, t, c, g, other or unknown
  modified_base (497): a, t, c, g, other or unknown
gcctataccatccgaaagcccagttgaaggatgcgggagtatatgaatgtgaatctaaaaacaaagttggctcacaattaagaagtttaacacttgatgttcaaggaagagaaaacaacaaagactatttttctcctgagcttctcgtgctctattttgcatcctccttaataatacctgccattggaatgataatttactttgcaagaaaagccaacatgaaggggtcatatagtcttgtagaagcacagaaatcaaaagtgtagctaatgcttgatatgttcaactgggagacactatttatctgtgcaaatccttggatactgctcatcattccttggggaaaaacaatggggctgagagggcagactttccctggatgtatttggaacttggggaaaggaaatgcccctctatggtcccttggctgtggagccaggaagtccaaagttaaaacttggntgccnggaagggacngttaaccggccntcaggtgngggggactggg

SEQ ID NO: 322 - DNA, 309 bp, Homo sapiens
cttagactggggctcggcctcgctctgaaaagtgcttaagaaaatcttctcagttctccttgcagaggactggcgccgggacgcgaagagcaacgggcgctgcacaaagcgggcgctgtcggtggtggagtgcgcatgtacgcgcaggcgcttctcgtggttggcgtgctgcagcgacaggcggcagcacagcacctgcacgaacacccgccgaaactgctgcgaggacaccgtgtacaggagcgggttgatgaccgagctgaggtagaaaaacgtctccgagaaggggaggaggatcatgtacgcccg

SEQ ID NO: 323 - DNA, 290 bp, Homo sapiens
cagatccaaggagaaagtcaggggccagtgcgcgctacagccagcgcccagtaccgcggtgtgatgggcaccattctgaccatggtgcgtactgagggcccccgaagcctctacaatgggctggttgccggcctgcagcgccaaatgagctttgcctctgtccgcatcggcctgtatgattctgtcaaacagttctacaccaagggctctgagcatgccagcattgggagccgcctcctagcaggcagcaccacaggtgccctggctgtggctgtgagccagcccacgga

SEQ ID NO: 324 - DNA, 400 bp, Homo sapiens
  modified_base (3): a, t, c, g, other or unknown
  modified_base (304): a, t, c, g, other or unknown
  modified_base (355): a, t, c, g, other or unknown
  modified_base (360): a, t, c, g, other or unknown
atnatttttgtaggtacaataaatctgattgatttttattacacatcttagtttagaatcacttttacattcctagacaaagagatgatacaaataaatatcaattgtaaaacttagagccccaagtattgattggcgtattctttgtctaaaggtagccaaagagaaggtcaagatcagtaataacttcaaggagccatgaagcccactgcctcctgcctgccccagggatcactcctttcataaataaccccagaagcatttcattcagggaaacaaggggcaggcaggaaagggtgacagntttctggaacaggtaccaaaacaaggccttgcgtggataggacaatcaccnggggnccactttttctttgggccaggttccctcaggggccttttt

SEQ ID NO: 325 - DNA, 591 bp, Homo sapiens
ccgacggcactgacggccatggcgcgttcgaacctcccgctggcgctgggcctggccctggtcgcattctgcctcctggcgctgccacgcgatgcccgggcccggccgcaggagcgcatggtcggagaactccgggacctgtcgcccgacgacccgcaggtgcagaaggcggcgcaggcggccgtggccagctacaacatgggcagcaacagcatctactacttccgagacacgcacatcatcaaggcgcagagccagctggtggccggcatcaagtacttcctgacgatggagatggggagcacagactgccgcaagaccagggtcactggagaccacgtcgacctcaccacttgccccctggcagcaggggcgcagcaggagaagctgcgctgtgactttgaggtccttgtggttccctggcagaactcctctcagctcctaaagcacaactgtgtgcagatgtgataagtccccgagggcgaaggccattgggtttggggccatggtggagggcacttcacgtccgtgggccgtatctgtcacaataaatggccagtgctgcttcttgcaaaaaaaaaaaaaaaaaaa

SEQ ID NO: 326 - DNA, 2166 bp, Mus musculus
tgttcaccaccaccatgaccccgggcattcgggctcctttcttcctgctgctacttctagcaagtctaaaaggttttcttgcccttccaagtgaggaaaacagtgtcacctcatctcaggacaccagcagttccttagcatcgactaccactccagtccacagcagcaactcagacccagccaccagacctccaggggactccaccagctctccagtccagagtagcacctcttctccagccaccagagctcctgaagactctaccagtactgcagtcctcagtggcacctcctccccagccaccacagctccagtgaactccgccagctctccagtagcccatggtgacacctcttccccagccactagcctttcaaaagactccaacagctctccagtagtccacagtggcacctcttcagctccggccaccacagctccagtggattccaccagctctccagtagtccacggtggtacctcgtccccagccaccagccctccaggggactccaccagctctccagaccatagtagcacctcttctccagccaccagagctcccgaagactctaccagtactgcagtcctcagtggcacctcctccccagccaccacagctccagtggactccaccagctctccagtagcccatgatgacacctcttccccagccactagcctttcagaagactccgccagctctccagtagcccacggtggcacctcttctccagccaccagccctctaagggactccaccagttctccagtccacagtagtgcctccatccaaaacatcaagactacatcagacttagctagcactccagaccacaatggcacctcagtcacaactaccagctctgcactgggctcagccaccagtccagaccacagtggtacctcaactacaactaacagctctgaatcagtcttggccaccactccagtttacagtagcatgccattctctactaccaaagtgacgtcaggctcagctatcattccagaccacaatggctcctcggtgctacctaccagttctgtgttgggctcagctaccagtctagtctataatacctctgcaatagctacaactccagtcagcaatggcactcagccttcagtgccaagtcaataccctgtttctcctaccatggccaccacctccagccacagcactattgccagcagctcttactatagcacagtaccattttctaccttctccagtaacagttcaccccagttgtctgttggggtctccttcttcttcttgtctttttacattcaaaaccacccatttaattcttctctggaagaccccagctccaactactaccaagaactgaagaggaacatttctggattgtttctgcagatttttaacggagattttctggggatctctagcatcaagttcaggtcaggctccgtggtggtagaatcgactgtggttttccgggagggtacttttagtgcctctgacgtgaagtcacagcttatacagcataagaaggaggcagatgactataatctgactatttcagaagtcaaagtgaatgagatgcagttccctccctctgcccagtcccggccgggggtaccaggctggggcattgccctgctggtgctggtctgtattttggttgctttggctatcgtctatttccttgccctggcagtgtgccagtgccgccgaaagagctatgggcagctggacatctttccaacccaggacacctaccatcctatgagtgaataccctacctaccacactcacggacgctacgtgccccctggcagtaccaagcgtagcccctatgaggaggtttcggcaggtaatggcagtagcagtctctcttataccaacccagctgtggtgaccacttctgccaacttgtaggagcaagtcaccccacccacttggggcagctttggcggtctgctccctcagtggtcactgccagacccctgcactctgatctgggctggtgagccaggacttctggtaggctgttcatgccctttgtcaagcgcctcaactacgtaagcctggtgaagcccagccctgccctgggggacactggggcagttagtggtggctctcagaaggactggcctggaaaactggagacagggatgggaacccaaacatagct

SEQ ID NO: 327 - DNA, 462 bp, Homo sapiens
  modified_base (180): a, t, c, g, other or unknown
  modified_base (403)..(404): a, t, c, g, other or unknown
  modified_base (406): a, t, c, g, other or unknown
  modified_base (408): a, t, c, g, other or unknown
tgctattccatgtatgtcataggtgtgaaaccttaaatctttccaacagccactgccttatggagactgtatcatccttatcttcatcttacaggtgagaaatctgcagtgaagaaaggtacatcccaaggggacaccgacagtaagcagcggactggggattccagacacgtggctggncctctgcaggaagaaatcaaacgtgtggaagggttggggagaggagatgcctagaagggattttcctgtattctcttagtggtgggggtaagaccgaggacccaagtcctcactcatcacgtcctccccagtgatgcaaggatggagctggggtaaaaccagggagaatcaggaccctcacgtcgctgcgtttattaagcatcagggtcagagctgggcaggnnangnggggaggcaaggtctaggtgagagacgttctggaaccagccagtggggtggtaa

SEQ ID NO: 328 - DNA, 432 bp, Homo sapiens
  modified_base (382): a, t, c, g, other or unknown
  modified_base (426): a, t, c, g, other or unknown
aagagaggaacccagtctttattttgaaacaataggtggcctcctggtggctggaacgtgctttcgcctgcggggcccagtgtccggaccccactggatctgcagcactcagacgcttaggatgtgtttcaagaaggcctcgtagttgatgcagccgttgctgtcctcgtgtcctgccagaacggtctccacctcctcctcagtcatcttctctccaagggtggtgagaacatgtctgagctctgctcccatgactttgccgttcccctccttgtcaaacacacgaaacccctccaagtagtcctcatatgtgccttggcctcggttcttggccactgctgggagcatgggcaggaaagtctcaaagtccacacgccgcganttcagctcatcactcttggggttcccagggaccttgagcacctnggcgtt

SEQ ID NO: 329 - DNA, 369 bp, Homo sapiens
atgaagcttctcacgggcctggttttctgctccttggtcctgagtgtcagcagccgaagcttcttttcgttccttggcgaggcttttgatggggctcgggacatgtggagagcctactctgacatgagagaagccaattacatcggctcagacaaatacttccatgctcgggggaactatgatgctgccaaaaggggacctgggggtgcctgggccgcagaagtgatcagcaatgccagagagaatatccagagactcacaggccatggtgcggaggactcgctggccgatcaggctgccaataaatggggcaggagtggcagagaccccaatcacttccgacctgctggcctgcctgagaaatactga

SEQ ID NO: 330 - DNA, 4318 bp, Homo sapiens
  modified_base (3953): a, t, c, g, other or unknown
  modified_base (3955): a, t, c, g, other or unknown
  modified_base (3967): a, t, c, g, other or unknown
ggcggtcgtagtcctcctggcccgcgcggtgtcccacagcgccagctccacctgcttgccgtccacctcaatgtctctggggcggaggcagcggcagtggagttcgctgcgcggctgttgggggccacctgtcttttcgcttgtgtccctctttctagtgtcgcgctcgagtcccgacgggccgctccaagcctcgacatgtcgtacaactacgtggtaacggcccagaagcccaccgccgtgaacggctgcgtgaccggacactttacttcggccgaagacttaaacctgttgattgccaaaaacacgagattagagatctatgtggtcaccgccgaggggcttcggcccgtcaaagaggtgggcatgtatgggaagattgcggtcatggagcttttcaggcccaagggggagagcaaggacctgctgtttatcttgacagcgaagtacaatgcctgcatcctggagtataaacagagtggcgagagcattgacatcattacgcgagcccatggcaatgtccaggaccgcattggccgcccctcagagaccggcattattggcatcattgaccctgagtgccggatgattggcctgcgtctctatgatggccttttcaaggttattccactagatcgcgataataaagaactcaaggccttcaacatccgcctggaggagctgcatgtcattgatgtcaagttcctatatggttgccaagcacctactatttgctttgtctaccaggaccctcaggggcggcacgtaaaaacctatgaggtgtctctccgagaaaaggaattcaataagggcccttggaaacaggaaaatgtcgaagctgaagcttccatggtgatcgcagtcccagagccctttgggggggccatcatcattggacaggagtcaatcacctatcacaatggtgacaaatacctggctattgcccctcctatcatcaagcaaagcacgattgtgtgccacaatcgagtggaccctaatggctcaagatacctgctgggagacatggaaggccggctcttcatgctgcttttggagaaggaggaacagatggatggcaccgtcactctcaaggatctccgtgtagaactccttggagagacctctattgctgagtgcttgacataccttgataatggtgttgtgtttgtcgggtctcgcctgggtgactcccagcttgtgaagctcaacgttgacagtaatgaacaaggctcctatgtagtggccatggaaacctttaccaacttaggacccattgtcgatatgtgcgtggtggacctggagaggcaggggcaggggcagctggtcacttgctctggggctttcaaggaaggttctttgcggatcatccggaatggaattggaatccacgagcatgccagcattgacttaccaggcatcaaaggattatggccactgcggtctgaccctaatcgtgagactgatgacactttggtgctctcttttgtgggccagacaagagttctcatgttaaatggagaggaggtagaagaaaccgaactgatgggtttcgtggatgatcagcagactttcttctgtggcaacgtggctcatcagcagcttatccagatcacttcagcatcggtgaggttggtctctcaagaacccaaagctctggtcagtgaatggaaggagcctcaggccaagaacatcagtgtggcctcctgcaatagcagccaggtggtggtggctgtaggcagggccctctactatctgcagatccatcctcaggagctccggcagatcagccacacagagatggaacatgaagtggcttgcttggacatcaccccattaggagacagcaatggactgtcccctctttgtgccattggcctctggacggacatctcggctcgtatcttgaagttgccctcttttgaactactgcacaaggagatgctgggtggagagatcattcctcgctccatcctgatgaccacctttgagagtagccattacctcctttgtgccttgggagatggagcgcttttctactttgggctcaacattgagacaggtctgttgagcgaccgtaagaaggtgactttgggcacccagcccaccgtattgaggacttttcgttctctttctaccaccaacgtctttgcttgttctgaccgccccactgtcatctatagcagcaaccacaaattggtcttctcaaatgtcaacctcaaggaagtgaactacatgtgtcccctcaattcagatggctatcctgacagcctggcgctggccaacaatagcaccctcaccattggcaccatcgatgagatccagaagctgcacattcgcacagttcccctctatgagtctccaaggaagatctgctaccaggaagtgtcccagtgtttcggggtcctctccagccgcattgaagtccaagacacgagtggggggcacgacagccttgaggcccagcgctagcacccaggctctgtccagcagtgtaagctccagcaagctgttctccagcagcactgctcctcatgagacctcctttggagaagaggtggaggtgcacaacctacttatcattgaccaacacacctttgaagtgcttcatgcccaccagtttctgcagaatgaatatgccctcagtctggtttcctgcaagctgggcaaagaccccaacacttacttcattgtgggcacagcaatggtgtatcctgaagaggcagagcccaagcagggtcgcattgtggtctttcagtattcggatggaaaactacagactgtggctgaaaaggaagtgaaaggggccgtgtactctatggtggaatttaacgggaagctgttagccagcatcaatagcacggtgcggctctatgagtggacaacagagaaggagctgcgcactgagtgcaaccactacaacaacatcatggccctctacctgaagaccaagggcgacttcatcctggtgggcgaccttatgcgctcagtgctgctgcttgcctacaagcccatggaaggaaactttgaagagattgctcgagactttaatcccaactggatgagtgctgtggaaatcttggatgatgacaattttctgggggctgaaaatgcctttaacttgtttgtgtgtcaaaaggatagcgctgccaccactgacgaggagcggcagcacctccaggaggttggtcttttccacctgggcgagtttgtcaatgtcttttgccacggctctctggtaatgcagaatctgggtgagacttccacccccacacaaggctcggtgctcttcggcacggtcaacggcatgatagggctggtgacctcactgtcagagagctggtacaacctcctgctggacatgcagaatcgactcaataaagtcatcaaaagtgtggggaagatcgagcactccttctggagatcctttcacaccgagcggaagacagaaccagccacaggtttcatcgacggtgacttgattgagagtttcctggatattagccgccccaagatgcaggaggtggtggcaaacctacagtatgacgatggcagcggtatgaagcgagaggccactgcagacgacctcatcaaggttgtggaggagctaactcggatccattagccaagggcagggggcccctttgctgaccctccccaaaggctttgccctgctgccctccccctcctctccaccatcgtcttcttggccatgggaggcctttccctaagccagctgcccccagagccacagttcccctatgtggaagtggggcgggcttcatagagacttgggaatgagctgaaggtgaaacattttctccctggatttttaccagtctcacatgattccagccatcaccttagaccaccaagccttgattggtgttgccagttgtcctccttccggggaaggattttgcagttctttggctgaaaggaagctgtgcgtggtntntgtgtgtatgtntgtgtgtgtatgtgtatctcacactcatgcattgtcctctttttatttagattggcagtgtagggagttgtgggtagtggggaagagggttaggagggtttcattgtctgtgaagtgagaccttccttttacttttcttctattgcctctgagagcatcaggcctagaggcctgactgccaagccatgggtagcctgggtgtaaaacctggagatggtggatgatccccacgccacagcccttttgtctctgcaaactgccttcttcggaaagaagaaggtgggaggatgtgaattgttagtttctgagttttaccaaataaagtagaatataagaagaaaggtaaaaaaa

SEQ ID NO: 331 - DNA, 1779 bp, Homo sapiens
  modified_base (1707): a, t, c, g, other or unknown
acgtgagctagctggcatggcggcctgcattgcagcggggcactgggctgcaatgggcctaggccggagtttccaagccgccaggactctgctccccccgccggcctctatcgcctgcagggtccacgcggggcctgtccggcagcagagcactgggccttccgagcccggtgcgttccaaccgccgccgaaaccggtcatcgtggacaagcaccgccccgtggaaccggaacgcaggttcttgagtcctgaattcattcctcgaaggggaagaacagatcctctgaaatttcaaatagaaagaaaagatatgttagaaaggagaaaagtactccacattccagagttctatgttggaagtattcttcgtgttactacagctgacccatatgccagtggaaaaatcagccagtttctggggatttgcattcagagatcaggaagaggacttggagctactttcatccttaggaatgttatcgaaggacaaggtgtcgagatttgctttgaactttataatcctcgggtccaggagattcaggtggtcaaattagagaaacggctggatgatagcttgctatacttacgagatgcccttcctgaatatagcacttttgatgtgaatatgaagccagtagtacaagagcctaaccaaaaagttcctgttaatgagctgaaagtaaaaatgaagcctaagccctggtctaaacgctgggaacgtccaaattttaatattaaaggaatcagatttgatctttgtttaactgaacagcaaatgaaagaagctcagaagtggaatcagccatggcttgaatttgatatgatgagggaatatgatacttcaaaaattgaagctgcaatatggaaggaaattgaagcgtcgaaaaggtcttgattctgagaatgaatttggttagttgcagaagatacattggctctaagaggatatattttgagaccaatttaatttcatttataagaacatagtaattaagtgaactaagcattcattgttttattaatactttttttctaaaataaaacttgtacaccagtttattactctaaaaagagaattacacatgccaaatggaccaatgtccatttgcttattggaggcaaagctacaatagaagtcagagcatcaccagaatggtctttaatgagcatggaacctgagcaaagggaataggtgggatgaattttttttttaattgtgaaacaattcataagcacaatatgatttacagaataataaacattcatgtacccactatcaggttaagaaatagaacatttattaatatgtaggaatgttaagaaataaaacatttaataagatctcagaagactccagtaaatctgcaattgtatctctctcctttttaaatgtaaatatcatcttgacttgttaattattcccttgcatttcttttagtttactgccaacacatatattcttcaacaatatatttaattttgaaaaacctgaaaaaaaaaacctgttagcaagtataaaggggcagtattactattattgcatgaaggcttcaagggaaacgttacagtctttgggccctagaggggcttcagcttcctctgagagtttacagggggccaatttttgaggcaaattcatgggctaaggtttatggagtggagttcttgccaaaacaggaaagggctcaccaacaagggtgatctggngcaggggtttattactgggggatacctgggattgttcgcaagaaattggtgggttaggaggggaaagtaaac

SEQ ID NO: 332 - DNA, 4344 bp, Homo sapiens
ccgggtcccgggtcctttgcggcgctagggtgggcgaacccagagcgacgctccgggacgatgtggggcagcgatcgcctggcgggtgctgggggaggcggggcggcagtgactgtggccttcaccaacgctcgcgactgcttcctccacctgccgcggcgtctcgtggcccagctgcatctgctgcagaatcaagctatagaagtggtctggagtcaccagcctgcattcttgagctgggtggaaggcaggcattttagtgatcaaggtgaaaatgtggctgaaattaacagacaagttggtcaaaaacttggactctcaaatgggggacaggtatttctcaagccatgttcccatgtggtatcttgtcaacaagttgaggtggaacccctctcagcagatgattgggagatactggagctgcatgctgtttcccttgaacaacatcttctagatcaaattcgaatagtttttccaaaagccatttttcctgtttgggttgatcaacaaacgtacatatttatccaaattgttgcactaataccagctgcctcttatggaaggctggaaactgacaccaaactccttattcagccaaagacacgccgagccaaagagaatacattttcaaaagctgatgctgaatataaaaaacttcatagttatggaagagaccagaaaggaatgatgaaagaacttcaaaccaagcaacttcagtcaaatactgtgggaatcactgaatctaatgaaaacgagtcagagattccagttgactcatcatcagtagcaagtttatggactatgataggaagcattttttcctttcaatctgagaagaaacaagagacatcttggggtttaactgaaatcaatgcattcaaaaatatgcagtcaaaggttgttcctctagacaatattttcagagtatgcaaatctcaacctcctagtatatataacgcgtcagcaacctctgtttttcataaacactgtgccattcatgtatttccatgggaccaggaatattttgatgtagagcccagctttactgtgacatatggaaagctagttaagctactttctccaaagcaacagcaaagtaaaacaaaacaaaatgtgttatcacctgaaaaagagaagcagatgtcagagccactagatcaaaaaaaaattaggtcagatcataatgaagaagatgagaaggcctgtgtgctacaagtagtctggaatggacttgaagaattgaacaatgccatcaaatataccaaaaatgtagaagttctccatcttgggaaagtctggattccagatgacctgaggaagagactaaatatagaaatgcatgccgtagtcaggataactccagtggaagttacccctaaaattccaagatctctaaagttacaacctagagagaatttacctaaagacataagtgaagaagacataaaaactgtattttattcatggctacagcagtctactaccaccatgcttcctttggtaatatcagaggaagaatttattaagctggaaactaaagatggactgaaggaattttctctgagtatagttcattcttgggaaaaagaaaaagataaaaatatttttctgttgagtcccaatttgctgcagaagactacaatacaagtccttctagatcctatggtaaaagaagaaaacagtgaggaaattgactttattcttccttttttaaagctgagctctttgggaggagtgaattccttaggcgtatcctccttggagcacatcactcacagcctcctgggacgccctttgtctcggcagctgatgtctcttgttgcaggacttaggaatggagctcttttactcacaggaggaaagggaagtggaaaatcaactttagccaaagcaatctgtaaagaagcatttgacaaactggatgcccatgtggagagagttgactgtaaagctttacgaggaaaaaggcttgaaaacatacaaaaaaccctagaggtggctttctcagaggcagtgtggatgcagccatctgttgtcctgctggatgaccttgacctcattgctggactgcctgctgtcccggaacatgagcacagtcctgatgcggtgcagagccagcggcttgctcatgctttgaatgatatgataaaagagtttatctccatgggaagtttggttgcactgattgccacaagtcagtctcagcaatctctacatcctttacttgtttctgctcaaggagttcacatatttcagtgcgtccaacacattcagcctcctaatcaggaacaaagatgtgaaattctgtgtaatgtaataaaaaataaattggactgtgatataaacaagttcaccgatcttgacctgcagcatgtagctaaagaaactggagggtttgtggctagagattttacagtacttgtggatcgagccatacattctcgactctctcgtcagagtatatccaccagagaaaaattagttttaacaacattggacttccaaaaggctctccgcggatttcttcctgcgtctttgcgaagtgtcaacctgcataaacctagagacctgggttgggacaagattggtgggttacatgaagttaggcagatactcatggatactatccagttacctgccaagtatccagaattatttgcaaacttgcccatacgacaaagaacaggaatactgttgtatggtccgcctggaacaggaaaaaccttactagctggggtaattgcacgagagagtagaatgaattttataagtgtcaaggggccagagttactcagcaaatacattggagcaagtgaacaagctgttcgggatatttttattagagcacaggctgcaaagccctgcattcttttctttgatgaatttgaatccattgctcctcggcggggtcatgataatacaggagttacagaccgagtagttaaccagttgctgactcagttggatggagtagaaggcttacagggtgtttatgtattggctgctactagtcgccctgacttgattgaccctgccctgcttaggcctggtcgactagataaatgtgtatactgtcctcctcctgatcaggtgtcacgtcttgaaattttaaatgtcctcagtgactctctacctctggcagatgatgttgaccttcagcatgtagcatcagtaactgactcctttactggagctgatctgaaagctttactttacaatgcccaattggaggccttacatggaatgctgctctcgagtggactccaggatggaagttccagctctgatagtgacctaagtctgtcttcaatggtctttcttaaccatagcagtggctctgacgattcagctggagatggagaatgtggcttagatcagtcccttgtttctttagagatgtccgagatccttccagatgaatcaaaattcaatatgtaccggctctactttggaagctcttatgaatcagaacttggaaatggaacctcttctgatttgaagctcacattgtctctctgcaccaagctccatgactcaggatttgcctggagttcctgggaaagaccagttgttttcacagcctccagtgttaaggacagcttcacaagagggttgccaagaacttacacaagaacaaagagatcaactgagggcagatatcagtattatcaaaggcagataccggagccaaagtggagaggacgaatccatgaaccaaccaggaccaatcaaaaccagactggctattagtcagtcacatttaatgactgcacttggtcacacaagaccatccattagtgaagatgactggaagaattttgctgagctatatgaaagctttcaaaatccaaagaggagaaaaaatcaaagtggaacaatgtttcgacctggacagaaagtaactttagcataaaatatacttctttttgatttggttctgttaagttttttgatggcttttccatatgttgtaacaggaaaaaaatggtgtctatgaatttcttcttaatttaacaaatttggttaatttataaaatcacagattggtaaatgctataattatgtaatgatcaggattgagattaatactgtagtataaattgggacattataacagattccatattttatttcctaaaatctaaattcagtctttaatgaaataatattagccaaatggtggaactaatttatttcttttgaggaaaagataataaagaatgtaattaaatttaaatttcttggaattcccagttgtatattcatcacctttgtagcatttgacaaattttatgcttagcagcttcttcactgttttgaaataaaatatcctattacctactg

SEQ ID NO: 333 - DNA, 8466 bp, Homo sapiens
  modified_base (665)..(687): a, t, c, g, other or unknown
gcgcctggcgcgggcgcgggcgcgaaggcgatccgggcgccaccccgcggtcatcggtcaccggtcgctctcaggaacagcagcgcaacctctgctccctgcctcgcctcccgcgcgcctaggtgcctgcgactttaattaaagggccgtcccctcgccgaggctgcagcaccgcccccccggcttctcgcgcctcaaaatgagtagctcccactctcgggcgggccagagcgcagcagggcgcggctccgggcggcggcgtcgacacgcgggacgccgagatgccggccaccgagaaggacctggcggaggacgcgccgtggaagaagatccagcagaacactttcacgcgctggtgcaacgagcacctgaagtgcgtgagcaagcgcatcgccaacctgcagacggacctgagcgacgggctgcggcttatcgcgctgttggaggtgctcagccagaagaagatgcaccgcaagcacaaccagcggcccactttccgccaaatgcagcttgagaacgtgtcggtggcgctcgagttcctggaccgcgagagcatcaaactggtgtccatcgacagcaaggccatcgtggacgggaacctgaagctgatcctgggcctcatctggaccctgatcctgcactactccatctccatgcccatgtgnnnnnnnnnnnnnnnnnnnnnnnccaagaagcagacccccaagcagaggctcctgggctggatccagaacaagctgccgcagctgcccatcaccaacttcagccgggactggcagagcggccgggccctgggcgccctggtggacagctgtgccccgggcctgtgtcctgactgggactcttgggacgccagcaagcccgttaccaatgcgcgagaggccatgcagcaggcggatgactggctgggcatcccccaggtgatcacccccgaggagattgtggaccccaacgtggacgagcactctgtcatgacctacctgtcccagttccccaaggccaagctgaagccaggggctcccttgcgccccaaactgaacccgaagaaagcccgtgcctacgggccaggcatcgagcccacaggcaacatggtgaagaagcgggcagagttcactgtggagaccagaagtgctggccagggagaggtgctggtgtacgtggaggacccggccggacaccaggaggaggcaaaagtgaccgccaataacgacaagaaccgcaccttctccgtctggtacgtccccgaggtgacggggactcataaggttactgtgctctttgctggccagcacatcgccaagagccccttcgaggtgtacgtggataagtcacagggtgacgccagcaaagtgacagcccaaggtcccggcctggagcccagtggcaacatcgccaacaagaccacctactttgagatctttacggcaggagctggcacgggcgaggtcgaggttgtgatccaggaccccatgggacagaagggcacggtagagcctcagctggaggcccggggcgacagcacataccgctgcagctaccagcccaccatggagggcgtccacaccgtgcacgtcacgtttgccggcgtgcccatccctcgcagcccctacactgtcactgttggccaagcctgtaacccgagtgcctgccgggcggttggccggggcctccagcccaagggtgtgcgggtgaaggagacagctgacttcaaggtgtacacaaagggcgctggcagtggggagctgaaggtcaccgtgaagggccccaagggagaggagcgcgtgaagcagaaggacctgggggatggcgtgtatggcttcgagtattaccccatggtccctggaacctatatcgtcaccatcacgtggggtggtcagaacatcgggcgcagtcccttcgaagtgaaggtgggcaccgagtgtggcaatcagaaggtacgggcctggggccctgggctggagggcggcgtcgttggcaagtcagcagactttgtggtggaggctatcggggacgacgtgggcacgctgggcttctcggtggaagggccatcgcaggctaagatcgaatgtgacgacaagggcgacggctcctgtgatgtgcgctactggccgcaggaggctggcgagtatgccgttcacgtgctgtgcaacagcgaagacatccgcctcagccccttcatggctgacatccgtgacgcgccccaggacttccacccagacagggtgaaggcacgtgggcctggattggagaagacaggtgtggccgtcaacaagccagcagagttcacagtggatgccaagcacggtggcaaggccccacttcgggtccaagtccaggacaatgaaggctgccctgtggaggcgttggtcaaggacaacggcaatggcacttacagctgctcctacgtgcccaggaagccggtgaagcacacagccatggtgtcctggggaggcgtcagcatccccaacagccccttcagggtgaatgtgggagctggcagccaccccaacaaggtcaaagtatacggccccggagtagccaagacagggctcaaggcccacgagcccacctacttcactgtggactgcgccgaggctggccagggggacgtcagcatcggcatcaagtgtgcccctggagtggtaggccccgccgaagctgacatcgacttcgacatcatccgcaatgacaatgacaccttcacggtcaagtacacgccccggggggctggcagctacaccattatggtcctctttgctgaccaggccacgcccaccagccccatccgagtcaaggtggagccctctcatgacgccataaggtgaaggccgagggccctggcctcagtcgcactggtgtcgagcttggcaagcccacccacttcacagtaaatgccaaagctgctggcaaaggcaagctggacgtccagttctcaggactcaccaagggggatgcagtgcgagatgtggacatcatcgaccaccatgacaacacctacacagtcaagtacacgcctgtccagcagggtccagtaggcgtcaatgtcacttatggaggggatcccatccctaagagccctttctcagtggcagtatctccaagcctggacctcagcaagatcaaggtgtctggcctgggagagaaggtggacgttggcaaagaccaggagttcacagtcaaatcaaagggtgctggtggtcaaggcaaagtggcatccaagattgtgggcccctcgggtgcagcggtgccctgcaaggtggagccaggcctgggggctgacaacagtgtggtgcgcttcctgccccgtgaggaagggccctatgaggtggaggtgacctatgacggcgtgccgtgcctggcagccctttctctggaagctgtggcccccaccaagcctagcaaggtgaaggcgtttgggccggggctgcagggaggcagtgcgggctcccccgcccgcttcaccatcgacaccaagggcgccggcacaggtggcctgggcctgacggtggagggcccctgtgaggcgcagctcgagtgcttggacaatggggatggcacatgttccgtgtcctacgtgcccaccgagcccggggactacaacatcaacatcctcttcgctgacacccacatccctggctccccattcaaggcccacgtggttccctgctttgacgcatccaaagtcaagtgctcaggccccgggctggagcgggccaccgctggggaggtgggccaattccaagtggactgctcgagcgcgggcagcgcggagctgaccattgagatctgctcggaggcggggcttccggccgaggtgtacatccaggaccacggtgatggcacgcacaccattacctacattcccctctgccccggggcctacaccgtcaccatcaagtacggcggccagcccgtgcccaacttccccagcaagctgcaggtggaacctgcggtggacacttccggtgtccagtgctatgggcctggtattgagggccagggtgtcttccgtgaggccaccactgagttcagtgtggacgcccgggctctgacacagaccggagggccgcacgtcaaggcccgtgtggccaacccctcaggcaacctgacggagacctacgttcaggaccgtggcgatggcatgtacaaagtggagtacacgccttacgaggagggactgcactccgtggacgtgacctatgacggcagtcccgtgcccagcagccccttccaggtgcccgtgaccgagggctgcgacccctcccgggtgcgtgtccacgggccaggcatccaaagtggcaccaccaacaagcccaacaagttcactgtggagaccaggggagctggcacggggcggcctgggcctggctgtagagggcccctccgaggccaagatgtcctgcatggataacaaggacggcagctgctcggtcgagtacatcccttatgaggctggcacctacagcctcaacgtcacctatggtggccatcaagtgccaggcagtcctttcaaggtccctgtgcatgatgtgacagatgcgtccaaggtcaagtgctctggggcccggcctgagcccaggcatggttcgtgccaacctccctcagtccttccaggtggacacaagcaaggctggtgtggccccattgcaggtcaaagtgcaagggcccaaaggcctggtggagccagtggacgtggtagacaacgctgatggcacccagaccgtcaattatgtgcccagccgagaagggccctacagcatctcagtactgtatggagatgaagaggtaccccggagccccttcaaggtcaaggtgctgcctactcatgatgccagcaaggtgaaggccagtggccccgggctcaacaccactggcgtgcctgccagcctgcccgtggagttcaccatcgatgcaaaggacgccggggagggcctgctggctgtccagatcacggatcccgaaggcaagccgaagaagacacacatccaagacaaccatgacggcacgtatacagtggcctacgtgccagacgtgacaggtcgctacaccatcctcatcaagtacggtggtgacgagatccccttctccccgtaccgcgtgcgtgccgtgcccaccggggacgccagcaagtgcactgtcacagtgtcaatcggaggtcacgggctaggtgctggcatcggccccaccattcagattggggaggagacggtgatcactgtggacactaaggcggcaggcaaaggcaaagtgacgtgcaccgtgtgcacgcctgatggctcagaggtggatgtggacgtggtggagaatgaggacggcactttcgacatcttctacacggccccccagccgggcaaatacgtcatctgtgtgcgctttggtggcgagcacgtgcccaacagccccttccaagtgacggctctggctggggaccagccctcggtgcagccccctctacggtctcagcagctggccccacagtacacctacgcccagggcggccagcagacttgggccccggagaggcccctggtgggtgtcaatgggctggatgtgaccagcctgaggccctttgaccttgtcatccccttcaccatcaagaagggcgagatcacaggggaggttcggatgccctcaggcaaggtggcgcagcccaccatcactgacaacaaagacggcaccgtgaccgtgcggtatgcacccagcgaggctggcctgcacgagatggacatccgctatgacaacatgcacatcccaggaagccccttgcagttctatgtggattacgtcaactgtggccatgtcactgcctatgggcctggcctcacccatggagtagtgaacaagcctgccaccttcaccgtcaacaccaaggatgcaggagaggggggcctgtctctggccattgagggcccgtccaaagcagaaatcagctgcactgacaaccaggatgggacatgcagcgtgtcctacctgcctgtgctgccgggggactacagcattctagtcaagtacaatgaacagcacgtcccaggcagccccttcactgctcgggtcacaggtgacgactccatgcgtatgtcccacctaaaggtcggctctgctgccgacatccccatcaacatctcagagacggatctcagcctgctgacggccactgtggtcccgccctcgggccgggaggagccctgtttgctgaagcggctgcgtaatggccacgtggggatttcattcgtgcccaaggagacgggggagcacctggtgcatgtgaagaaaaatggccagcacgtggccagcagccccatcccggtggtgatcagccagtcggaaattggggatgccagtcgtgttcgggtctctggtcagggccttcacgaaggccacacctttgagcctgcagagtttatcattgatacccgcgatgcaggctatggtgggctcagcctgtccattgagggccccagcaaggtggacatcaacacagaggacctggaggacgggacgtgcagggtcacctactgccccacagagccaggcaactacatcatcaacatcaagtttgccgaccagcacgtgcctggcagccccttctctgtgaaggtgacaggcgagggccgggtgaaagagagcatcacccgcaggcgtcgggctccttcagtggccaacgttggtagtcattgtgacctcagcctgaaaatccctgaaattagcatccaggatatgacagcccaggtgaccagcccatcgggcaagacccatgaggccgagatcgtggaaggggagaaccacacctactgcatccgctttgttcccgctgagatgggcacacacacagtcagcgtgaagtacaagggccagcacgtgcctgggagccccttccagttcaccgtggggcccctaggggaagggggagcccacaaggtccgagctgggggccctggcctggagagagctgaagctggagtgccagccgaattcagtatctggacccgggaagctggtgctggaggcctggccattgctgtcgagggccccagcaaggctgagatctcttttgaggaccgcaaggacggctcctgtggtgtggcttatgtggtccaggagccaggtgactacgaagtctcagtcaagttcaacgaggaacacattcccgacagccccttcgtggtgcctgtggcttctccgtctggcgacgcccgccgcctcactgtttctagccttcaggagtcagggctaaaggtcaaccagccagcctcttttgcagtcagcctgaacggggccaagggggcgatcgatgccaaggtgcacagcccctcaggagccctggaggagtgctatgtcacagaaattgaccaagataagtatgctgtgcgcttcatccctcgggagaatggcgtttacctgattgacgtcaagttcaacggcacccacatccctggaagccccttcaagatccgagttggggagcctgggcatggaggggacccaggcttggtgtctgcttacggagcaggtctggaaggcggtgtcacagggaacccagctgagttcgtcgtgaacacgagcaatgcgggagctggtgccctgtcggtgaccattgacggcccctccaaggtgaagatggattgccaggagtgccctgagggctaccgcgtcacctatacccccatggcacctggcagctacctcatctccatcaagtacggcggcccctaccacattgggggcagccccttcaaggccaaagtcacaggcccccgtctcgtcagcaaccacagcctccacgagacatcatcagtgtttgtagactctctgaccaaggccacctgtgccccccagcatggggccccgggtcctgggcctgctgacgccagcaaggtggtggccaagggcctggggctgagcaaggcctacgtaggccagaagagcagcttcacagtagactgcagcaaagcaggcaacaacatgctgctggtgggggttcatggcccaaggaccccctgcgaggagatcctggtgaagcacgtgggcagccggctctacagcgtgtcctacctgctcaaggacaagggggagtacacactggtggtcaaatggggggacgagcacatcccaggcagcccctaccgcgttgtggtgccctgagtctggggcccgtgccagccggcagcccccaagcctgccccgctacccaagcagccccgccctcttcccctcaaccccggcccaggccgccctggccgcccgcctgtcactgcagccgcccctgccctgtgccgtgctgcgctcacctgcctccccagccagccgctgacctctcggctttcacttgggcagagggagccatttggtggcgctgcttgtcttctttggttctgggaggggtgagggatgggggtcctgtacacaaccacccactagttctcttctccagccaagaggaataaagttttgcttccattctcaaaa

SEQ ID NO: 334 - DNA, 2601 bp, Homo sapiens
  modified_base (2263): a, t, c, g, other or unknown
gggcgacgggcgcatctacgtggggaaccttccgaccgacgtgcgcgagaaggacttggaggacctgttctacaagtacggccgcatccgcgagatcgagctcaagaacaggcacggcctcgtgcccttcgccttcgtgcgcttcgaggacccccgagatgcagaggatgctatttatggaagaaatggttatgattatggccagtgtcggcttcgtgtggagttccccaggacttatggaggtcggggtgggtggccccgtggtgggaggaatgggcctcctacaagaagatctgatttccgagttcttgtttcaggtatgttcctttcaaacagaatgagatgatacatgtaaaatacttaacacagactctgtgttccaagaaatgatagctgttattcttcagtgcatgggacacgggggctttcttttcaatagcctgtgtgaagccttgccctggattgccaatgaggaaagtatcctgcaaatgaaattgcgctgggagtgcagccttggaagaacataaccatatttcttgtaaaggagttttctagtggtgagaaggaaagatgatgggaaaacttgagctacaattctaaagatgcttcttttggaatatacttggcatcagacatggtagaaaggcattcaaggagccagatttgaacaacttacccagccttggatcctgaagaagatcagattttgtggtggttttagaattaaatattttttaaaaccccgtaacttaagagtcttagagattttattggaaagtatagactatttctgtctagtgtttataagtgatgaaatgctaaactgggaggtttatctatcttcaaaatattaacacactggaaagacctggggccttctgcatattgcatgggagttttagggccctggtggaatgaaataaatcgaggagcctggcacctttttaagatgtgaatgtcacacaatcacagcatactcccatgtgcttaagagtgatactctcagtatctgcctatcttgtgtccctttgtaattttttaaccccagaactctattccctccttcaggatgtcatacattatctttttttctctccatgctgctctgaaatcctgcttagaaaactattaggaaatggctgcagtcctgagctgtgagcggtaaacacagcctttgagagcaggagcacatttccctttcatgacatcaggtagggttgtatgactcccgactagttttagcatctgagtcttaccttcccccccactgtattgaagaatgttggtgatcttttaagaggtactctgtatagtttgtcattcatacctacaagaaaacaaactttagattttttgttgttgtgttgttaccttcagctactctttggttatttcatgtctggtttcaaaattcccatgtcctgtgaaaccctgtcaagcaataaataattggtactgttaaatttcataatggaaaaaattggaactcaaagtattaggagtttggcattgattttaaaggacaaagaaagaggctatgaattctcaaagatactaaacctgtaatgggatggacttcttgctctgttgaaaaggcctggtctctggaagatgaacttaaaaccagcttctcaaagtggttcatttaccacacatacttcagtgctcttttctgatttcatgtcccttatcaaggtttatgatttggggaccctcaggatttaagtgatcatggagaaaggaccataggtattgctggctcttaacagggcagttaacatagctgaaggatgtgggctttcttatgttctccatgcctaggacttcctccgtcaggcagctggcaggacctgaaggatcacatgcgagaagctggggatgtctgttatgctgatgtgcagaaggatggagtggggatggtcgagtatctcagaaaagaagacatggaatatgccctgcgtaaactggatgacaccaaattccgctctcatgagggtgaaacttcctacatccgagtttatcctgagagaagcaccagctatggctactcacggtctcggtctgggtcaaggggccgtgactctccataccaaagcaggggttccccacactacttctctcctttcaggccctactgagacaggtgatgggaattttttctttattttttaggttaactgagctgctttgtgctcagaatctacattccagattgaggatttagtgtcttaggaaatttttttaatttttttttttttaaagnagaaaaaaactacataatttctaccagggccatattagcagtgaaacattttaaactgcagaaattgtggtttgggttcagaaacaagttgtatatttttcacccctgattatgggaaaaaaatcagttctgtcttggtgggttgctctactatggagatcaacagttactgtgactgagtcggcccattctgtttagaaatatattttaaatgtttagtgtttcctcgctttccaagttacattttatcttgagcagatttaaaacgagattagctgtaataggactccaggatgtgggcagatgtctacttgtcaaagggagaatccaaatacaac

SEQ ID NO: 335 - DNA, 1984 bp, Homo sapiens
  modified_base (1973): a, t, c, g, other or unknown
ggctacccgggccagcagcagaacttccactcggtgcgggagatgttcgagtcacagaggatcggcttgaacaactctccagtgaacgggaatagtagctgtcaaatggccttcccttccagccagtctctgtaccgcacgtccggagctttcgtctacgactgtagcaagttttgacacaccctcaaagccgaactaaatcgaaccccaaagcaggaaaagctaaaggaacccatcaaggcaaaatcgaaactaaaaaaaaaaaatccaattaaaaaaaacccctgagaatattcaccacaccagcgaacagaatatccctccaaaaattcagctcaccagcaccagcacgaagaaaactctattttcttaaccgattaattcagagccacctccactttgccttgtctaaataaacaaacccgtaaactgttttatacagagacagcaaaatcttggtttattaaaggacagtgttactccagataacacgtaagtttcttcttgcttttcagagacctgctttcccctcctcccgtctcccctctcttgccttcttccttgcctctcacctgtaagatattattttatcctatgttgaagggagggggaaagtccccgtttatgaaagtcgctttctttttattcatggacttgttttaaaatgtaaattgcaacatagtaatttatttttaatttgtagttggatgtcgtggaccaaacgccagaaagtgttcccaaaacctgacgttaaattgcctgaaactttaaattgtgctttttttctcattataaaaagggaaactgtattaatcttattctatcctcttttctttctttttgttgaacatattcattgtttgtttattaataaattaccattcagtttgaatgagacctatatgtctggatactttaatagagctttaattattacgaaaaaagatttcagagataaaacactagaagttacctattctccacctaaatctctgaaaaatggagaaaccctctgactagtccatgtcaaattttactaaaagtctttttgtttagatttattttcctgcagcatcttctgcaaaatgtactatatagtcagcttgctttgaggctagtaaaaagatatttttctaaacagattggagttggcatataaacaaatacgttttctcactaatgacagtccatgattcggaaattttaagcccatgaatcagccgcggtcttaccacggtgatgcctgtgtgccgagagatgggactgtgcggccagatatgcacagataaatatttggcttgtgtattccatataaaattgcagtgcatattatacatccctgtgagccagatgctgaatagatattttcctattatttcagtcctttataaaaggaaaaataaaccagtttttaaatgtatgtatataattctcccccatttacaatccttcatgtattacatagaaggattgcttttttaaaaatatactgcgggttggaaagggatatttaatctttgagaaactattttagaaaatatgtttgtagaacaattatttttgaaaaagatttaaagcaataacaagaaggaaggcgagaggagcagaacattttggtctagggtggtttctttttaaaccattttttcttgttaatttacagttaaacctaggggacaatccggattggccctcccccttttgtaaataacccaggaaatgtaataaattcattatcttagggtgatctgccctgccaatcagactttggggagatggcgatttgattacagacgttcgggggggtggggggcttgcagtttgttttggagataatacagtttcctgctatctgccgctcctatctagaggcaacacttaagcagtaattgctgttgcttgttgtcaaaatttgatcattgttaaaggattgctgcaaataaatacactttaatttcagtccaaaaaaaaanaaaaaaagggc

SEQ ID NO: 336 - DNA, 969 bp, Homo sapiens
ttttttctgggtttctagtgaatttaatgcatgagtctcaaaaatcaatggcaaaggaaaaaatgaataaaattaaaatggggtcaggagaaaagggccatgggcacacacaggaggggcagtcagtggctgagctaggagctgaagcaggggaattccttaggtgtcatatctcgtccaacccgtagtcctcctccgggaagtcccccaccgtcacgactgctggcttgacaaaggcgccatacttggcctggcattcgaagtagcgtttcccattcacactgccatcatttttccccagtggctcatcatagcggacaccaatccagtagccaggcttgaaatctgtgagacctacatacatgacggtgccccggcgaggggattgtcccgccgcccgcacctcacagcggctgcccacggggatggagctggcctgggccttctcctcggccaggcgctgggcggcctcggcctcctgctgagcccgctcctcctcgttgtaccggccgagcttgctgcgcttcaggaaagagcggaccgtgtcttgcctctggtcgtaggcttcttgtgagatcgtgtacttctccacccgggacacgtcctcatactcaccaaggcgggcgccactgtggtcaatgacgtggatgcggcagccgtcatctacagggtaggagcccaggagcgcatcctcttgatccagcttgctgtagaacttgtcgtcaactccatacagctccagttccatgcaggaagcagggctgcccaccagcaactccagtttacacttgaactcagcgatggtgaggctgcggctgtatcgcttctcggagcggaaggtgttgagggagctgctgatgaaaacggtcaccgtgggtgccgacacccccgtcacctccatcttgccgcgccctgcggatgcctgcagcgcaggtccagccgcctcacacccgctccgcagccgccgcc

SEQ ID NO: 337 - DNA, 215 bp, Homo sapiens
gctgggatgcgttgggggaggaggcgcctgctgccagctttcctctggtacccgctgtgggggtggcatccagggttgggtgcccggcttgacaggtacgttagttttgacacgccggaccaaagggactgtgacccggggtcgcttcacagggaccgccctgggcactggcacgggcgacagacggccccggtagtcgaagagcctgtcgtaga

SEQ ID NO: 338 - DNA, 3134 bp, Homo sapiens
gagggcgcccccaccccacccgcccaccctccccgcttctcgctaggtcccgattggctggcgcgctccgcggctgggatggcagtgggaggggaccctctttcctaacggggttataaaaacagcgccctcggcggggtccagtcctctgccactctcgctccgaggtccccgcgccagagacgcagccgcgctcccaccacccacacccaccgcgccctgcgttcgcctcttctccgggagccagtcccgcgccaccgccgccgcccaggccatcgccaccctccgcagccatgttccaccaggtccgtgtcctcgtcctcctaccgcaggatgttcggcggcccgggcaccgcgagccggccgagctccagccggagctacgtgactacgtccacccgcacctacagcctgggcagcgcgctgcgccccagcaccagccgcagcctctacgcctcgtccccgggcggcgtgtatgccacgcgctcctctgccgtgcgcctgcggagcagcgtgcccggggtgcggctcctgcaggactcggtggacttctcgctggccgacgccatcaacaccgagttcaagaacacccgcaccaacgagaaggtggagctgcaggagctgaatgaccgcttcgccaactacatcgacaaggtgcgcttcctggagcagcagaataagatcctgctggccgagctcgagcagctcaagggccaaggcaagtcgcgcctgggggacctctacgaggaggagatgcgggagctgcgccggcaggtggaccagctaaccaacgacaaagcccgcgtcgaggtggagcgcgacaacctggccgaggacatcatgcgcctccgggagaaattgcaggaggagatgcttcagagagaggaagccgaaaacaccctgcaatctttcagacaggatgttgacaatgcgtctctggcacgtcttgaccttgaacgcaaagtggaatctttgcaagaagagattgcctttttgaagaaactccacgaagaggaaatccaggagctgcaggctcagattcaggaacagcatgtccaaatcgatgtggatgtttccaagcctgacctcacggctgccctgcgtgacgtacgtcagcaatatgaaagtgtggctgccaagaacctgcaggaggcagaagaatggtacaaatccaagtttgctgacctctctgaggctgccaaccggaacaatgacgccctgcgccaggcaaagcaggagtccactgagtaccggagacaggtgcagtccctcacctgtgaagtggatgcccttaaaggaaccaatgagtccctggaacgccagatgcgtgaaatggaagagaactttgccgttgaagctgctaactaccaagacactattggccgcctgcaggatgagattcagaatatgaaggaggaaatggctcgtcaccttcgtgaataccaagacctgctcaatgttaagatggcccttgacattgagattgccacctacaggaagctgctggaaggcgaggagagcaggatttctctgcctcttccaaacttttcctccctgaacctgagggaaactaatctggattcactccctctggttgatacccactcaaaaaggacacttctgattaagacggttgaaactagagatggacaggttatcaacgaaacttctcagcatcacgatgaccttgaataaaaattgcacacactcagtgcagcaatatattaccagcaagaataaaaaagaaatccatatcttaaagaaacagctttcaagtgcctttctgcagtttttcaggagcgcaagatagatttggaataggaataagctctagttcttaacaaccgacactcctacaagatttagaaaaaagtttacaacataatctagtttacagaaaaatcttgtgctagaatactttttaaaaggtattttgaatactattaaaactgcttttttttttccagcaagtatccaaccaacttggttctgcttcaataaatctttggaaaaacaaagcagttttaatagtattcaaaataccttttaaaaagtattctagcacaagatttttctgtaaactagattatgttgtaaacttttttctaaatcttgtaggagtgtcggttgttaagaactagagcttattcctattccaaatctatcttgcgctcctgaaaaactgcagaaaggcacttgaaagctgtttctttaagatatggatttcttttttaccttgctggtaatatattgctgcactgagtgtgtgcaatttttattcaaggtcatcgtgatgctgagaagtttcgttgataacctgtccatctctagtttcaaccgtcttaatcagaagtgtcctttttgagtgggtatcaaccagagggagtgaatccagattagtttccctcaggttcagggaggaaaagtttggaagaggcagagaaatcctgctctcctcgccttccagctgctaactaccaagacactattggccgcctgcaggatgagattcagaatatgaaggaggaaatggctcgtcaccttcgtgaataccaagacctgctcaatgttaagatggcccttgacattgagattgccacctacaggaagctgctggaaggcgaggagagcaggatttctctgcctcttccaaacttttcctccctgaacctgagggaaactaatctgggattcactcccctctggttgatacccactcaaaaaggacacttctgattaagacggttgaaactagagatggacaggttatcaacgaaacttctcagcatcacgatgaccttgaataaaaattgcacacactcagtgcagcaatatattaccagcaagaataaaaaagaaattcatatcttaaagaaacagctttcaagtgcctttctgcagtttttcaggagcgcaagatagatttggaataggaataagctctagttcttaacaaccgacactcctacaagatttagaaaaaagtttacaacataatctagtttacagaaaaatcttgtgctagaatactttttaaaaggtattttgaataccattaaaactgcttttttttttccagcaagtatccaaccaacttgtttctgcttcaataaatctttggaaaaactcaaaaa

SEQ ID NO: 339 - DNA, 1823 bp, Homo sapiens
cgctccacctctcaagcagccagcgcctgcctgaatctgttctgccccctccccacccatttcaccaccaccatgacaccgggcacccagtctcctttcttcctgctgctgctcctcacagtgcttacagttgttacaggttctggtcatgcaagctctaccccaggtggagaaaaggagacttcggctacccagagaagttcagtgcccagctctactgagaagaatgctgtgagtatgaccagcagcgtactctccagccacagccccggttcaggctcctccaccactcagggacaggatgtcactctggccccggccacggaaccagcttcaggttcagctgccacctggggacaggatgtcacctcggtcccagtcaccaggccagccctgggctccaccaccccgccagcccacgatgtcacctcagccccggacaacaagccagccccgggctccaccgcccccccagcccacggtgtcacctcggccccggacaccaggccggccccgggctccaccgcccccccagcccatggtgtcacctcggccccggacaacaggcccgccttgggctccaccgcccctccagtccacaatgtcacctcggcctcaggctctgcatcaggctcagcttctactctggtgcacaacggcacctctgccagggctaccacaaccccagccagcaagagcactccattctcaattcccagccaccactctgatactcctaccacccttgccagccatagcaccaagactgatgccagtagcactcaccatagcacggtacctcctctcacctcctccaatcacagcacttctccccagttgtctactggggtctctttctttttcctgtcttttcacatttcaaacctccagtttaattcctctctggaagatcccagcaccgactactaccaagagctgcagagagacatttctgaaatgtttttgcagatttataaacaagggggttttctgggcctctccaatattaagttcaggccaggatctgtggtggtacaattgactctggccttccgagaaggtaccatcaatgtccacgacgtggagacacagttcaatcagtataaaacggaagcagcctctcgatataacctgacgatctcagacgtcagcgtgagtgatgtgccatttcctttctctgcccagtctggggctggggtgccaggctggggcatcgcgctgctggtgctggtctgtgttctggttgcgctggccattgtctatctcattgccttggctgtctgtcagtgccgccgaaagaactacgggcagctggacatctttccagcccgggatacctaccatcctatgagcgagtaccccacctaccacacccatgggcgctatgtgccccctagcagtaccgatcgtagcccctatgagaaggtttctgcaggtaatggtggcagcagcctctcttacacaaacccagcagtggcagccacttctgccaacttgtaggggcacgtcgcccgctgagctgagtggccagccagtgccattccactccactcaggttcttcagggccagagcccctgcaccctgtttgggctggtgagctgggagttcaggtgggctgctcacagcctccttcagaggccccaccaatttctcggacacttctcagtgtgtggaagctcatgtgggcccctgagggctcatgcctgggaagtgttgtggtgggggctcccaggaggactggcccagagagccctgagatagcggggatcctgaactggactgaataaaacgtggtctcccactgcgccaaaaaaattaaaaa

SEQ ID NO: 340 - DNA, 7000 bp, Homo sapiens
gtcctacgtagataacagcttccgccaggcggtgatgaagaatccccccgaaaggaccccccaggatctggaaatagtatattcctatttacatggtatggaagccttatcaaacttgagggagcatcaacttaggttaatgtgtgaaactgtgagatatgagagacacgaagcaaatgaagttttatactaccctgatgatattgggacctgctggtatatccttctttctggttccgtgttcatcaaggaatccatgtttcttccaagaagcagttttggcaagcgttctgcaggaagttttaggcgtggctgtgaatgcattgttttagagccttctgaaatgattgtggtggactatatggatgaaaatgaagaatattttcagcggcaagcttcccatagacagtctcgaaggagatttagaaaaatcaaccagaaaggtgaaagacaaacaattattgacactgtggatccttatcccatgggcaaacctcctttgcctagaggctatcacacggaatgcactaaatctcagcttcctgcagatttcacaaaactgcatcttactgacagtctccacccacaggtgacccacgtttcttctagccattcaggatgtagtatcactagtgattctgggagcagcagtctttctgatatctaccaggccacagaaagcgaggctggtgatatggacctgagtgggttgccagaaacagcagtggattccgaagacgacgacgatgaagaagacattgagagagcatcagatcctctgatgagcagggacattgtgagagactgcctagagaaggacccaattgaccggacagatgatgacattgaacaactcttggaatttatgcaccagttgcctgcttttgccaatatgacaatgtcagtgaggcgagaactctgtgctgtgatggtgttcgcagtggtggaaagagcagggaccatagtgttaaatgatggtgaagagctggactcctggtcagtgattctcaatggatctgtggaagtgacttatccagatggaaaagcagaaatactgtgcatgggaaatagttttggtgtctctcctaccatggacaaagaatacatgaaaggagtgatgagaacaaaggtggatgactgccagtttgtctgcatagcccagcaagattactgccgtattctcaatcaagtagaaaagaacatgcaaaaagttgaagaggaaggagagattgttatggtgaaagaacaccgagaacttgatcgaactggaacaagaaagggacacattgtcatcaagggtacctcagaaaggttaacaatgcatttggtggaagagcattcagtagtagatccaacattcatagaagactttctgttgacctataggacttttctttctagcccaatggaagtgggcaaaaagttattggagtggtttaatgacccgagcctcagggataaggttacacgggtagtattattgtgggtaaataatcacttcaatgactttgaaggagatcctgcaatgactcgatttttagaagaatttgaaaacaatctggaaagagagaaaatgggtggacacctaaggctgttgaatatcgcgtgtgctgctaaagcaaaaagaagattgatgacgttaacaaaaccatcccgagaagctcctttgccttttatcttacttggaggctctgagaagggatttggaatctttgttgacagtgtagattcaggtagcaaagcaactgaagcaggcttgaaacggggggatcagatattagaagtaaatggccaaaactttgaaaacattcagctgtcaaaagctatggaaattcttagaaataacacacatttatctatcactgtgaaaaccaatttatttgtatttaaagaacttctaacaagattgtcagaagagaaaagaaatggtgccccccaccttcctaaaattggtgacattaaaaaggccagtcgctactccattccagatcttgctgtagatgtagaacaggtgataggacttgaaaaagtgaacaaaaaaagtaaagccaacactgtgggaggaaggaacaagctgaaaaagatactcgacaagactcggatcagtatcttgccacagaaaccatacaatgatattgggattggtcagtctcaagatgacagcatagtaggattaaggcagacaaagcacatcccaactgcattgcctgtcagtggaaccttatcatccagtaatcctgatttattgcagtcacatcatcgcattttagacttcagtgctactcctgacttgccagatcaagtgctaagggtttttaaggctgatcagcaaagccgctacatcatgatcagtaaggacactacagcaaaggaagtggtcattcaggctatcagggagtttgctgttactgccaccccggatcaatattcactatgtgaggtctctgtcacacctgagggagtaatcaaacaaagaagacttccagatcagctttccaaacttgcagacagaatacaactgagtggaaggtattatctgaaaaacaacatggaaacagaaactctttgttcagatgaagatgctcaggagttgttgagagagagtcaaatttccctccttcagctcagcactgtggaagttgcaacacagctctctatgcgaaattttgaactctttcgcaacattgaacctactgaatatatagatgatttatttaaactcagatcaaaaaccagctgtgccaacctgaagagatttgaagaagtcattaaccaggaaacattttgggtagcatctgaaattctcagagaaacaaaccagctgaagaggatgaagatcattaagcatttcatcaagatagcactgcactgtagggaatgcaagaattttaactcaatgtttgcaatcatcagtggcctaaacctggcaccagtggcaagactgcgaacgacctgggagaaacttcccaataaatacgaaaaactatttcaagatctccaagacctgtttgatccttccagaaacatggcaaaatatcgtaatgttctcaatagtcaaaatctacaacctcccataatccctctattcccagttatcaaaaaggatctcaccttccttcacgaaggaaatgactcaaaagtagacgggctggtcaattttgagaagctaaggatgattgcaaaagaaattcgtcacgttggccgaatggcttcagtgaacatggaccctgccctcatgttcaggactcggaagaagaaatggcggagtttggggtctctcagccagggtagtacaaatgcaacagtgctagatgttgctcagacaggtggtcataaaaagcgggtacgtcgtagttcctttctcaatgccaaaaagctttatgaagatgcccaaatggctcgaaaagtgaagcagtacctttccaatttggagctagaaatggacgaggagagtcttcagacattatctctgcagtgtgagccagcaaccaacacattgcctaagaatcctggtgacaaaaagcctgtcaaatccgagacctctccagtagctccaagggcagggtcacaacagaaagctcagtccctgccacagccccagcagcagccaccaccagcacataaaatcaaccagggactacaggttcccgccgtgtccctttatccttcacggaagaaagtgcccgtaaaggatctcccaccttttggcataaactctccacaagctttaaaaaaaattctttctttgtctgaagaaggaagtttggaacgtcacaagaaacaggctgaagatacaatatcaaatgcatcttcgcagctttcttctcctcctacttctccacagagttctccaaggaaaggctatactttggctcccagtggtactgtggataatttttcagattctggtcacagtgaaatttcttcacgatccagtattgttagcaattcgtcttttgactcagtgccagtctcactgcacgatgagaggcgccagaggcattctgtcagcatcgtggaaacaaacctagggatgggcaggatggagaggcggaccatgattgaacctgatcagtatagcttggggtcctatgcaccaatgtccgagggccgaggcttatatgctacagctacagtaatttcttctccaagcacagaggaactttcccaggatcagggggatcgcgcgtcacttgatgctgctgacagtggccgtgggagctggacgtcatgctcaagtggctcccatgataatatacagacgatccagcaccagagaagctgggagactcttccattcgggcatactcactttgattattcaggggatcctgcaggtttatgggcatcaagcagccatatggaccaaattatgttttctgatcatagcacaaagtataacaggcaaaatcaaagtagagagagccttgaacaagcccagtcccgagcaagctgggcgtcttccacaggttactggggagaagactcagaaggtgacacaggcacaataaagcggaggggtggaaaggatgtttccattgaagccgaaagcagtagcctaacgtctgtgactacggaagaaaccaagcctgtccccatgcctgcccacatagctgtggcatcaagtactacaaaggggctcattgcacgaaaggagggcaggtatcgagagcccccgcccacccctcccggctacattggaattcccattactgactttccagaagggcactcccatccagccaggaaaccgccggactacaacgtggcccttcagagatcgcggatggtcgcacgatcctccgacacagctgggccttcatccgtacagcagccacatgggcatcccaccagcagcaggcctgtgaacaaacctgcagtggcataaaccgaacgagtctgacccgcgcctcgccccctatcagtcccaagggttttccaccgaggaggatgaagatgaacaagtttctgctgtttgaggcacagacttttctggaagcagagcgagccacctgaaaggagagcacaagaagacgtcctgagcattggagccttggaactcacattctgaggacggtggaccagtttgcctccttccctgccttaaaagcagcatggggcttcttctccccttcttcctttcccctttgcatgtgaaatactgtgaagaaattgccctggcacttttcagactttgttgcttgaaatgcacagtgcagcaatcttcgagctcccactgttgctgcctgccacatcacacagtatcattccaaattccaagatcatcacaacaagatgattcactctggctgcacttctcaatgcctggaaggattttttttaatcttccttttagatttcaatccagtcctagcacttgatctcattgggataatgagaaaagctagccattgaactacttggggcctttaacccaccaaggaagacaaagaaaaacaatgaaatcctttgagtacagtgcttgtccacttgtttacaatgtcctccttttaaaaaaaaaaatgagtttaaagattttgttcagagagtaaatatatatccatttaatgattacagtattattttaaaccttaagtagggttgccagcctggtttctgaaaaaccaaatatgccggacagggtgtggccacaccaagaagacgggaagacctggcttgtgaccctggcttcccatgtccttctggtctcacccgcgaagtgccctatcctggaagtatgaaatgttagccaattaataccaagacacctcatctgctccttccccagtggatggggttcttctgtaaaactgtttgcacatggccaggggagggaactaggacccttgtgtcctgtctgagccttatggaggcaggacggtgtcattggcggatgtgtcctgctccattgagatggatggcaaaccccatttttaagttatatttctttgatttttgttaatttagaggtgtaggttttgttttttgtttttttgtttttttttaagagaaacatttataactggatagcattgcagtgaaagcagcttgggatgttggagctaatgccagctgtttatactgctctttcaagacagcctccctttattgaattggcattagggaataaacaagcctttaaacgtgataaaagatcaaaaacctggttagacatgccagcctttgcaaggcaggttagtcaccaaagactaacctccaagtggctttatggacgctgcatatagagaaggcctaagtgtagcaaccatctgctcacagctgctattaaccctataatgactgaaatgacccctccactctatttttgtgttgttttgcacagactccggaaaagtgaaggctgccaatctgagtagtactcaaatgtgaggaactgctggtcttggattttttttccattaaattcagctgatcatattgatcagtagataaacgtaaatagcttcaaattttaaaagtggaattgcagtgttttttcactgtatcaaacaatgtcagtgctttatttaataattctcttctgtatcatggcatttgtctacttgcttattacattgtcaattatgcatttgtaattttacatgtaatatgcattatttgccagttttattatataggctatggacctcatgtgcatatagaaagacagaaatctagctctaccacaagttgcacaaatgttatctaagcattaagtaattgtagaacataggactgctaatctcagttcgctctgtgatgtcaagtgcagaatgtacaattaactggtgatttcctcatacttttgatactacttgtacctgtatgtcttttagaaagacattggtggagtctgtatcccttttgtatttttaatacaataattgtacatattggttatatttttgttgaagatggtagaaatgtactatgtttatgcttctacatccagtttgtacaagctggaaaataaataaatataacataaagccttgcctat

SEQ ID NO: 341 - DNA, 1572 bp, Homo sapiens
ctcgagtactccccgtaacgaggaggtgttctcggccgtcccacccttcactgccgtctccgggctgcgccgccggagccgggacgcgcctccgcagccctcgccggctccatccccgcggccgcagctcctctcgccgtccgcgcgcacaccatgacgaagaacgagaagaagtccctcaaccagagcctggccgagtggaagctcttcatctacaacccgaccaccggagaattcctggggcgcaccgccaagagctggggtttgatcttgctcttctacctagttttttatgggttcctggctgcactcttctcattcacgatgtgggttatgcttcagactctcaacgatgaggttccaaaataccgtgaccagattcctagcccaggactcatggtttttccaaaaccagtgaccgcattggaatatacattcagtaggtctgatccaacttcgtatgcagggtacattgaagaccttaagaagtttctaaaaccatatactttagaagaacagaagaacctcacagtctgtcctgatggagcactttttgaacagaagggtccagtttatgttgcatgtcagtttcctatttcattacttcaagcatgcagtggtatgaatgatcctgattttggctattctcaaggaaacccttgtattcttgtgaaaatgaacagaataattggattaaagcctgaaggagtgccaaggatagattgtgtttcaaagaatgaagatataccaaatgtagcagtttatcctcataatggaatgatagacttaaaatatttcccatattatgggaaaaaactgcatgttgggtatctacagccattggttgctgttcaggtcagctttgctcctaacaacactgggaaagaagtaacagttgagtgcaagattgatggatcagccaacctaaaaagtcaggatgatcgtgacaagtttttgggacgagttatgttcaaaatcacagcacgtgcatagtatgagtaggatatctccacagagtaaatgttgtgttgtctgtcttcattttgtaacagctggaccttccattctagaattatgagaccaccttggagaaaggtgtgtggtacatgacattgggttacatcataacgtgcttccagatcatagtgttcagtgtcctctgaagtaactgcctgttgcctctgctgccctttgaaccagtgtacagtcgccagatagggaccggtgaacacctgattccaaacatgtaggatgggggtcttgtcctctttttatgtggtttaattgccaagtgtctaaagcttaatatgccgtgctatgtaaatattttatggatataacaactgtcatattttgatgtcaacagagttttagggataaaatggtacccggccaacatcaagtgactttatagctgcaagaaatgtggtatgtggagaagttctgtatgtgagcttccgttatctacctggcccctgtaggaattccagtttgagaccccctactgcatacgaactctgggaatcctacaaattctacaggcagctgtggactgggaatctcagaaccaaa

SEQ ID NO: 342 - DNA, 2031 bp, Homo sapiens
gagccctgggcggggcggctgttggggggaatgggttcggggtgccctgggcagggggctactggggggcggctgtgaggaggagttgggttcagggagccctgggcggggtggctgtcagggggaactgggttccgggagccctgggccggggcagggggcggctgtaggaaggaactggtttcggggagccctgggcggggcggctgtggggaggaaggtgacgtgcaggggaccagaggctctgcactgctcctaggacagctcatctgtaatcagaaaaaaaataaacaaaatacagaacgctgactcctccgtgagacagatcggggaccttagcactttaatccctcccttctgagcgctcggtgtgcacttttagactatagctgtttcattgacgtgtcactctccatccagtgtccttgatgtggcttttagagacttagcagaaaattcgacacaagcaggaacttgattttttaagaaaaaatattacattttgaggacattttgacaagtaggggaagagagggcttctgttgttttgttttgttttgttttgttaactaaacctgaagtattaattccacaaagacactgtccctcaggaccactcaggtacagctctgccagggacagagtcctgctagtgggaggtctcaggtggggcggtgtgttctgtgccatgaggcagcgacaggtccagatggatgtcgtcaccaccttcctcagctctcatcacctggtcgtacgccaggcccacctcttcccagcaagggacgccaaagaactgcagtttttattctgagtcttaatttaacttttcatcatcttttcctattttggagaattttttgtaattaaaagcaattattttaaaatgtgcaagccagtatctcacaaggcatggatttctgtggaatttatttttattcaaataaccatatttatctccaggctgtggaatcgccactttctttgtgaagacagtgtctctccttgtaatctcacacaggtacactgaggaggggacggctccgtcttcacattgtgcacagatctgaggatgggattagcgaagctgtggagactgcacatccggacctgcccatgtctcaaaacaaacacatgtacagtggctctttttccttctcaaacactttaccccagaagcaggtggtctgccccaggcataaagaaggaaaattggccatctttcccacctctaaattctgtaaaattatagacttgctcaaaagattccttttgatcatccccacgctgtgtaagtggaaagggcattgtgttccgtgtgtgtccagtttacagcgtctctgccccctagcgtgttttgtgacaatctccctgggtgaggagtgggtgcacccagccccgaggccagtggttgctcggggccttccgtgtgagttctagtgttcacttgatgccggggaatagaattagagaaaactctgacctgccgggttccagggactggtggaggtggatggcaggtccgactcgaccatgacttagttgtaagggtgtgtcggctttttcagtctcatgtgaaaatcctcctgtctctggcagcactgtctgcactttcttgtttactgtttgaagggacgagtaccaagccacaagaacacttcttttggccacagcataagctgatggtatgtaaggaaccgatgggccattaaacatgaactgaacggttaaaagcacagtctatggaacgctaatggagtcagcccctaaagctgtttgctttttcaggctttggattacatgcttttaatttgattttagaatctggacactttctatgaatgtaattcggctgagaaacatgttgctgagatgcaatcctcagtgttctctgtatgtaaatctgtgtatacaccacacgttacaactgcatgagcttcctctcgcacaagaccagctggaactgagcatgagacgctgtcaaatacagacaaaggatttgagatgttctcaataaaaagaaaatgtttcact

SEQ ID NO: 343 - DNA, 1811 bp, Homo sapiens
cgggcgcgacgcctgtagggacagtctggggtttggctgtccggacggtgcagcggcgaggccggccgcgaagatgccagtggcggtgatggcggaaagcgcctttagtttcaaaaagttgctggatcagtgcgagaaccaggagctcgaggcccctggaggaattgctacacccccagtgtatggtcagcttctagctttatatttgctccataatgacatgaataatgcaagatatctttggaaaagaataccacctgctataaaatctgcaaattctgaacttgggggaatttggtcagtaggacaaagaatctggcagagagatttccctgggatctatacaaccatcaacgctcaccagtggtctgagacggtccagccaattatggaagcacttagagatgcaacaaggagacgcgcctttgccctggtctctcaagcgtatacttcaatcatcgccgatgattttgcagcctttgttggacttcctgtagaagaggctgtgaaaggcatattagaacaaggatggcaagctgattccaccacaagaatggttctgcccagaaagccagttgcaggggccctggatgtttcctttaacaagtttattcccttatcagagcctgctccagttcccccaatacccaatgaacagcagttagccagactgacggattatgtggctttccttgaaaactgatttatcactctgagttcaagattcatcttcagaatcctgtatactgacaaacgtagaaatgtaaagtttgtattttcaatttattggatggcttaagcacctcagcattccttactatgtgataaaatacatatagaatataagatatactatatacattttgtccataaacgttatgctgaatagttgttgaaacagttctcattttgtagtatttaataatctggatggagcctgtcagtattacagttagttttctagtgactcataaaataagatttcctgtttcatgtagaatagtgtttgtcaactgtcttttctctgtcccagcacatgccgtactcttatatgtaccattggttgataattataatgattcatttggacttgaagaaagattgtccccaggcacagtatctgaatcactggggattatgattcaccctctttggagaacatgctctcttttcaccccccacctcctgagagccactaatgtaagatacagaaacatagctgaggaacaaatagaccatttccatactaaaccagtttgttaactttagattttttccaatagtgtgagtatatccattgctggcagtggagggcttgccatgaaaatgcaacttatttaagacatttatgagacatattaacttgtgctgtcgccttttagaaggagaaacttaagtgtggaatgcattatatgggcaaagaagctatgaagatacatgatacactttgtacaactatcctgcagcccattggttgcttatatttatcgcttggctcaagttctgccctttggagaaatactgagcaagtctttcattctctgtgtgacagccctctgaatatttgaagttgtttgttgtaacttaaggttataacagcccttagttcatttactctgcatttgttcaataaatatttaactgaattcttcaattatttcatctaagatagtttctggaaatttcactctcgatctttctgtggacacaatctattttgtcattgtgtctatatgaatctcttaagtagaaatgagttgtatggtgaatctgtgtagtgataattatataatttatttattttgaatgca

SEQ ID NO: 344 - DNA, 3270 bp, Homo sapiens
  modified_base (2708): a, t, c, g, other or unknown
  modified_base (2746): a, t, c, g, other or unknown
  modified_base (2806): a, t, c, g, other or unknown
caaaaagtgtgtggaaaggtggattgagggagcgggacccccgcgggacccgagggggcggcaggcggggaacggggagtcagcccgcgctgtgtctcggggccggccggcaggaaggagccatggctctggacgggataaggatgccagatggctgctacgcggacgggacgtgggaactgagtgtccatgtgacggacctgaaccgcgatatcaccctgagagtgaccggcgaggtgcacattggaggcgtgatgcttaagctggtggagaaactcgatgtaaaaaaagattggtctgaccatgctctctggtgggaaaagaagagaacttggcttctgaagacacattggaccttagataagtatggtattcaggcagatgctaagcttcagttcacccctcagcacaaactgctccgcctgcagcttcccaacatgaagtatgtgaaggtgaaagtgaatttctctgatagagtcttcaaagctgtttctgacatctgtaagacttttaatatcagacaccccgaagaactttctctcttaaagaaacccagagatccaacaaagaaaaaaaagaagaagctagatgaccagtctgaagatgaggcacttgaattagaggggcctcttatcactcctggatcaggaagtatatattcaagcccaggactgtatagtaaaacaatgacccccacttatgatgctcatgatggaagccccttgtcaccaacttctgcttggtttggtgacagtgctttgtcagaaggcaatcctggtatacttgctgtcagtcaaccaatcacgtcaccagaaatcttggcaaaaatgttcaagcctcaagctcttcttgataaagcaaaaatcaaccaaggatggcttgattcctcaagatctctcatggaacaagatgtgaaggaaaatgaggccttgctgctccgattcaagtattacagcttttttgatttgaatccaaagtatgatgcaatcagaatcaatcagctttatgagcaggccaaatgggccattctcctggaagagattgaatgcacagaagaagaaatgatgatgtttgcagccctgcagtatcatatcaataagctgtcaatcatgacatcagagaatcatttgaacaacagtgacaaagaagttgatgaagttgatgctgccctttcagacctggagattactctggaagggggtaaaacgtcaacaattttgggtgacattacttccattcctgaacttgctgactacattaaagttttcaagccaaaaaagctgactctgaaaggttacaaacaatattggtgcaccttcaaagacacatccatttcttgttataagagcaaagaagaatccagtggcacaccagctcatcagatgaacctcaggggatgtgaagttaccccagatgtaaacatttcaggccaaaaatttaacattaaactcctgattccagttgcagaaggcatgaatgaaatctggcttcgttgtgacaatgaaaaacagtatgcacactggatggcagcctgcagattagcctccaaaggcaagaccatggcggacagttcttacaacttagaagttcagaatattctttcctttctgaagatgcagcatttaaacccagatcctcagttaataccagagcagatcacgactgatataactcctgaatgtttggtgtctccccgctatctaaaaaagtataagaacaagcagataacagcgagaatcttggaggcccatcagaatgtagctcagatgagtctaattgaagccaagatgagatttattcaagcttggcagtcactacctgaatttggcatcactcacttcattgcaaggttccaagggggcaaaaaagaagaacttattggaattgcatacaacagactgattcggatggatgccagcactggagatgcaattaaaacatggcgtttcagcaacatgaaacagtggaatgtcaactgggaaatcaaaatggtcaccgtagagtttgcagatgaagtacgattgtccttcatttgtactgaagtagattgcaaagtggttcatgaattcattggtggctacatatttctctcaacacgtgcaaaagaccaaaacgagagtttagatgaagagatgttctacaaacttaccagtggttgggtgtgaatagaaatactgtttaatgaaactccacggccataacaatatttaactttaaaagctgtttgttatatgctgcttaataaagtaagcttgaaatttatcattttatcatgaaaacttctttgccttaccagaccagttaatatgtgcactaaacaagcacgactattaatctatcatgttatgatataataaacttgaatttggcacacattccttagggccatgaattgaaaactgaaatagtgggcaaatcaggaacaaaccatcactgatttactgatttaagctagccaaactgtaagaaacaagccatctattttaaagctatccagggcttaacctatatgaactctatttatcatgtctaatgcatgtgatttaatgtatgtttaatttgatatcatgttttaaaatatcctacttctggtagccatttaattcctccccctacccccaaataaatcaggcatgcaggaggcctgatatttagtaatgtcattgtgtttgaccttgaaggaaaatgctattagtccgtcgtgcttnatttgtttttgtccttgaataagcatgttatgtatatngtctcgtgtttttatttttacaccatattgtattacacttttagtattcaccagcataancactgtctgcctaaaatatgcaactctttgcattacaatatgaagtaaagttctatgaagtatgcattttgtgtaactaatgtaaaaacacaaattttataaaattgtacagttttttaaaaactactcacaactagcagatggcttaaatgtagcaatctctgcgttaattaaatgcctttaagagatataattaacgtgcagttttaatatctactaaattaagaatgacttcattatgatcatgatttgccacaatgtccttaactctaatgcctggactggccatgttctagtctgttgcgctgttacaatctgtattggtgctagtcagaaaattcctagctcacatagcccaaaagggtgcgagggagaggtggattaccagtattgttcaataatccatggttcaaagactgtataaatgcattttattttaaataaaagcaaaacttttatttaaa

SEQ ID NO: 345 - DNA, 3170 bp, Homo sapiens
gaggactatgaggactgtgagtagggtcctgccagccccacctgggtcggacccctggcctgggggatgtgccaatgggcccatcccagccttgggccccactctgagccagcctccccctcagttgagtacattcggcgccagaagcaacccaggccacccccaagcagaaggaggaggcccgagcgggtctggccagacccccctgaggagaaggccccggccccagccccggaggagaggattgagcctcctgtgaagcctctgctgcccccgctgccccctgactatggtgatggttacgtgatccccaactacgatgacatggactattactttgggcctcctccgccccagaagcccgatgctgagcgccagacggacgaagagaaggaggagctgaagaaacccaaaaaggaggacagcagccccaaggaggagaccgacaagtgggcagtggagaagggcaaggaccacaaagagccccgaaagggcgaggagttggaggaggagtggacgcctacggagaaagtcaagtgtccccccattgggatggagtcacaccgtattgaggacaaccagatccgagcctcctccatgctgcgccacggcctgggggcacagcgcggccggctcaacatgcagaccggtgccactgaggacgactactatgatggtgcgtggtgtgccgaggacgatgccaggacccagtggatagaggtggacaccaggaggactacccggttcacaggcgtcatcacccagggcagagactccagcatccatgacgattttgtgaccaccttcttcgtgggcttcagcaatgacagccagacatgggtgatgtacaccaacggctatgaggaaatgacctttcatgggaacgtggacaaggacacacccgtgctgagtgagctcccagagccggtggtggctcgtttcatccgcatctacccactcacctggaatggcagcctgtgcatgcgcctggaggtgctggggtgctctgtggcccctgtctacagctactacgcacagaatgaggtggtggccaccgatgacctggatttccggcaccacagctacaaggacatgcgccagctcatgaaggtggtgaacgaggagtgccccaccatcacccgcacttacagcctgggcaagagctcacgaggcctcaagatctatgccatggagatctcagacaaccctggggagcatgaactgggggagcccgagttccgctacactgctgggatccatggcaacgaggtgctgggccgagagctgttgctgctgctcatgcagtacctgtgccgagagtaccgcgatgggaacccacgtgtgcgcacgctggtgcaggacacacgcatccacctggtgccctcactgaaccctgatggctacgaggtggcagcgcagatgggctcagagtttgggaactgggcgctgggactgtggactgaggagggctttgacatctttgaagatttcccggatctcaactctgtgctctggggagctgaggagaggaaatgggtcccctaccgggtccccaacaataacttgcccatccctgaacgctacctttcgccagatgccacggtatccacggaggtccgggccatcattgcctggatggagaagaaccccttcgtgctgggagcaaatctgaacggcggcgagcggctagtatcctacccctacgatatggcccgcacgcctacccaggagcagctgctggccgcagccatggcagcagcccggggggaggatgaggacgaggtctccgaggcccaggagactccagaccacgccatcttccggtggcttgccatctccttcgcctccgcacacctcaccttgaccgagccctaccgcggaggctgccaagcccaggactacaccggcggcatgggcatcgtcaacggggccaagtggaacccccggaccgggactatcaatgacttcagttacctgcataccaactgcctggagctctccttctacctgggctgtgacaagttccctcatgagagtgagctgccccgcgagtgggagaacaacaaggaggcgctgctcaccttcatggagcaggtgcaccgtggcattaagggggtggtgacggacgagcaaggcatccccattgccaacgccaccatctctgtgagtggcattaatcacggcgtgaagacagccagtggtggtgattactggcgaatcttgaacccgggtgagtaccgcgtgacagcccacgcggagggctacaccccgagcgccaagacctgcaatgttgactatgacatcggggccactcagtgcaacttcatcctggctcgctccaactggaagcgcatccgggagatcatggccatgaacgggaaccggcctatcccacacatagacccatcgcgccctatgaccccccaacagcgacgcctgcagcagcgacgcctacaacaccgcctgcggcttcgggcacagatgcggctgcggcgcctcaacgccaccaccaccctaggcccccacactgtgcctcccacgctgccccctgcccctgccaccaccctgagcactaccatagagccctggggcctcataccgccaaccaccgctggctgggaggagtcggagactgagacctacacagaggtggtgacagagtttgggaccgaggtggagcccgagtttgggaccaaggtggagcccgagtttgagacccagttggagcctgagtttgagacccagctggaacccgagtttgaggaagaggaggaggaggagaaagaggaggagatagccactggccaggcattccccttcacaacagtagagacctacacagtgaactttggggacttctgagatcagcgtcctaccaagaccccagcccaactcaagctacagcagcagcacttcccaagcctgctgaccacagtcacatcacccatcagcacatggaaggcccctggtatggacactgaaaggaagggctggtcctgcccctttgagggggtgcaaacatgactgggacctaagagccagaggctgtgtagaggctcctgctccacctgccagtctcgtaagagatggggttgctgcagtgttggagtaggggcagagggagggagccaaggtcactccaataaaacaagctcatggcaaaaaaaaaa

SEQ ID NO: 346 - DNA, 133 bp, Homo sapiens
ctttattgggaaacgtaagacttgggtacatcaaataaaaccaatttctgggggaaaaaatcaaaacccacaataaaaaaaaagttaacactgtctgggccacagcagaacccaaagaacatattcgtataat

SEQ ID NO: 347 - DNA, 1458 bp, Homo sapiens
ctcacttctgcttgcacttaggcgacctcgggagctcggactcctacgcagtcaccgggaagggccgccgccccgcccgcggctgctggcccgggtgacacttccgcctgctataagagcagcggccctcggtgcctccttcctgacctcgcacccagctcggagcccggagcgtgcctcgggcggcctgtcggttttcaccatggagcagctgagctcagcaaacacccgcttcgccttggacctgttgcctggcgttgagtgagaacaatccggctggaaacatcttcatctctcccttcagcatttcatctgctatggccatggtttttctggggaccagaggtaacacggcagcacagctgtccaagactttccatttcaacacggttgaagaggttcattcaagattccagagtctgaatgctgatatcaacaaacgtggagcgtcttatattctgaaacttgctaatagattatatggagagaaaacttacaatttccttcctgagttcttggtttcgactcagaaaacatatggtgctgacctggccagtgtggattttcagcatgcctctgaagatgcaaggaagaccataaaccagtgggtcaaaggacagacagaaggaaaaattccggaactgttggcttcgggcatggttgataacatgaccaaacttgtgctagtaaatgccatctatttcaagggaaactggaaggataaattcatgaaagaagccacgacgaatgcaccattcagattgaataagaaagacagaaaaactgtgaaaatgatgtatcagaagaaaaaatttgcatatggctacatcgaggaccttaagtgccgtgtgctggaactgccttaccaaggcgaggagctcagcatggtcatcctgctgccggatgacattgaggacgagtccacgggcctgaagaagattgaggaacagttgactttggaaaagttgcatgagtggactaaacctgagaatctcgatttcattgaagttaatgtcagcttgcccaggttcaaactggaagagagttacactctcaactccgacctcgcccgcctaggtgtgcaggatctctttaacagtagcaaggctgatctgtctggcatgtcaggagccagagatatttttatatcaaaaattgtccacaagtcatttgtggaagtgaatgaagagggaacagaggcggcagctgccacagcaggcatcgcaactttctgcatgttgatgcccgaagaaaatttcactgccgaccatccattccttttctttattcggcataattcctcaggtagcatcctattcttggggagattttcttccccttagaagaaagagactgtagcaatacaaaaatcaagcttagtgctttattacctgagtttttaatagagccaatatgtcttatatctttaccaataaaaccactgttcagaaaaaaaaa

SEQ ID NO: 348 - DNA, 3143 bp, Homo sapiens
ccttctccccggcggttagtgctgagagtgcggagtgtgtgctccgggctcggaacacacatttattattaaaaaatccaaaaaaaatctaaaaaaatcttttaaaaaaccccaaaaaaatttacaaaaaatccgcgtctcccccgccggagacttttattttttttcttcctcttttataaaataacccggtgaagcagccgagaccgacccgcccgcccgcggccccgcagcagctccaagaaggaaccaagagaccgaggccttcccgctgcccggacccgacaccgccaccctcgctccccgccggcagccggcagccagcggcagtggatcgaccccgttctgcggccgttgagtagttttcaattccggttgatttttgtccctctgcgcttgctccccgctcccctccccccggctccggcccccagccccggcactcgctctcctcctctcacggaaaggtcgcggcctgtagaactcgccagccgtgccgagatgaaccccagtgcccccagctaccccatggcctcgctctacgtgggggacctccaccccgacgtgaccgaggcgatgctctacgagaagttcagcccggccgggcccatcctctccatccgggtctgcagggacatgatcacccgccgctccttgggctacgcgtatgtgaacttccagcagccggcggacgcggagcgtgctttggacaccatgaattttgatgttataaagggcaagccagtacgcatcatgtggtctcagcgtgatccatcacttcgcaaaagtggagtaggcaacatattcattaaaaatctggacaaatccattgataataaagcactgtatgatacattttctgcttttggtaacatcctttcatgtaaggtggtttgtgatgaaaatggttccaagggctatggatttgtacactttgagacgcaggaagcagctgaaagagctattgaaaaaatgaatggaatgctcctaaatgatcgcaaagtatttgttggacgatttaagtctcgtaaagaacgagaagctgaacttggagctagggcaaaagaattcaccaatgtttacatcaagaattttggagaagacatggatgatgagcgccttaaggatctctttggcaagtttgggcctgccttaagtgtgaaagtaatgactgatgaaagtggaaaatccaaaggatttggatttgtaagctttgaaaggcatgaagatgcacagaaagctgtggatgagatgaacggaaaggagctcaatggaaaacaaatttatgttggtcgagctcagaaaaaggtggaacggcagacggaacttaagcgcaaatttgaacagatgaaacaagataggatcaccagataccagggtgttaatctttatgtgaaaaatcttgatgatggtattgatgatgaacgtctccggaaagagttttctccatttggtacaatcactagtgcaaaggttatgatggagggtggtcgcagcaaagggtttggttttgtatgtttctcctccccagaagaagccactaaagcagttacagaaatgaacggtagaattgtggccacaaagccattgtatgtagctttagctcagcgcaaagaagagcgccaggctcacctcactaaccagtatatgcagagaatggcaagtgtacgagctgttcccaaccctgtaatcaacccctaccagccagcacctccttcaggttacttcatggcagctatcccacagactcagaaccgtgctgcatactatcctcctagccaaattgctcaactaagaccaagtcctcgctggactgctcagggtgccagacctcatccattccaaaatatgcccggtgctatccgcccagctgctcctagaccaccatttagtactatgagaccagcttcttcacaggttccacgagtcatgtcaacacagcgtgttgctaacacatcaacacagacaatgggtccacgtcctgcagctgcagccgctgcagctactcctgctgtccgcaccgttccacagtataaatatgctgcaggagttcgcaatcctcagcaacatcttaatgcacagccacaagttacaatgcaacagcctgctgttcatgtacaaggtcaggaacctttgactgcttccatgttggcatctgcccctcctcaagagcaaaagcaaatgttgggtgaacggctgtttcctcttattcaagccatgcaccctactcttgctggtaaaatcactggcatgttgttggagattgataattcagaacttcttcatatgctcgagtctccagagtcactccgttctaaggttgatgaagctgtagctgtactacaagcccaccaagctaaagaggctgcccagaaagcagttaacagtgccaccggtgttccaactgtttaaaattgatcagggaccatgaaaagaaacttgtgcttcaccgaagaaaaatatctaaacatcgaaaaacttaaatattatggaaaaaaaacattgcaaaatataaaataaataaaaaaaggaaaggaaactttgaaccttatgtaccgagcaaatgccaggtctagcaaacataatgctagtcctagattacttattgatttaaaaacaaaaaaacacaaaaaaatagtaaaatataaaaacaaattaatgttttatagaccctgggaaaaagaattttcagcaaagtacaaaaatttaaagcattcctttctttaattttgtaattctttactgtggaatagctcagaatgtcagttctgttttaagtaacagaattgataactgagcaaggaaacgtaatttggattataaaattcttgctttaataaaaattccttaaacagtgcacggatttgctttttttcaaagtctttataattgccatgcataaataggtaatatcttaatggtgctgagccgacataagaatcttttatgaaaaatgtactgttaagttcagggggtctattggttttatgtaaaaggcacaagacaattcctgtagtgcattttatgagttaaggtttccatacggattattgaaacaatttgttacatgtatttgttacatgatcttaatatttcatgtacaagactgacacccatccacttttgaagataagccagtttat

SEQ ID NO: 349 - DNA, 4035 bp, Homo sapiens
  modified_base (2626): a, t, c, g, other or unknown
  modified_base (3304)..(3502): a, t, c, g, other or unknown
gagatcccagcgctgcagaacttggggagccgccgccgccatccgccgccgcagccagcttcctgccgccgcaggaccggcccctgccccagcctccgcagccgcggcgcgtccacgcccgcccgcgcccagggcgagtcggggtcgccgcctgcacgcttctcagtgttccccgcgccccgcatgtaacccggccaggcccccgcaactgtgtcccctgcagctccagccccgggctgcacccccccgccccgacaccagctctccagcctgctcgtccaggatggccgcggccaaggccgagatgcagctgatgtccccgctgcagatctctgacccgttcggatcctttcctcactcgcccaccatggacaactaccctaagctggaggagatgatgctgctgagcaacggggctccccagttcctcggcgccgccggggccccagagggcagcggcagcaacagcagcagcagcagcagcgggggcggtggaggcggcgggggcggcagcaacagcagcagcagcagcagcaccttcaaccctcaggcggacacgggcgagcagccctacgagcacctgaccgcagagtcttttcctgacatctctctgaacaacgagaaggtgctggtggagaccagttaccccagccaaaccactcgactgccccccatcacctatactggccgcttttccctggagcctgcacccaacagtggcaacaccttgtggcccgagcccctcttcagcttggtcagtggcctagtgagcatgaccaacccaccggcctcctcgtcctcagcaccatctccagcggcctcctccgcctccgcctcccagagcccacccctgagctgcgcagtgccatccaacgacagcagtcccatttactcagcggcacccaccttccccacgccgaacactgacattttccctgagccacaaagccaggccttcccgggctcggcagggacagcgctccagtacccgcctcctgcctaccctgccgccaagggtggcttccaggttcccatgatccccgactacctgtttccacagcagcagggggatctgggcctgggcaccccagaccagaagcccttccagggcctggagagccgcacccagcagccttcgctaacccctctgtctactattaaggcctttgccactcagtcgggctcccaggacctgaaggccctcaataccagctaccagtcccagctcatcaaacccagccgcatgcgcaagtaccccaaccggcccagcaagacgcccccccacgaacgcccttacgcttgcccagtggagtcctgtgatcgccgcttctcccgctccgacgagctcacccgccacatccgcatccacacaggccagaagcccttccagtgccgcatctgcatgcgcaacttcagccgcagcgaccacctcaccacccacatccgcacccacacaggcgaaaagcccttcgcctgcgacatctgtggaagaaagtttgccaggagcgatgaacgcaagaggcataccaagatccacttgcggcagaaggacaagaaagcagacaaaagtgttgtggcctcttcggccacctcctctctctcttcctacccgtccccggttgctacctcttacccgtccccggttactacctcttatccatccccggccaccacctcatacccatcccctgtgcccacctccttctcctctcccggctcctcgacctacccatcccctgtgcacagtggcttcccctccccgtcggtggccaccacgtactcctctgttccccctgctttcccggcccaggtcagcagcttcccttcctcagctgtcaccaactccttcagcgcctccacagggctttcggacatgacagcaaccttttctcccaggacaattgaaatttgctaaagggaaaggggaaagaaagggaaaagggagaaaaagaaacacaagagacttaaaggacaggaggaggagatggccataggagaggagggttcctcttaggtcagatggaggttctcagagccaagtcctccctctctactggagtggaaggtctattggccaacaatcctttctgcccacttccccttccccaattactattccctttgacttcagctgcctgaaacagccatgtccaagttcttcacctctatccaaagaacttgatttgcatggattttggataaatcatttcagtatcatctccatcatatgcctgaccccttgctcccttcaatgctagaaaatcgagttggcaaaatggggtttgggcccctcagagccctgccctgcacccttgtacagtgtctgtgccatggatttcgtttttcttggggtactcttgatgtgaagataatttgcatattctattgtattatttggagttaggtcctcacttgggggaaaaccacaaaaggaaaagccaagcaaaccaatggtgatcctctattttgtgatgatgctgtgacaataagtttgaacctttttttttgaaacagcagtcccagtattctcagagcatgtgtcagagtgttgttccgttaacctttttgtaaatactgcttgaccgtactctcacatgtggcaaaatatggtttggtttttcttttnttttttttttgaaagtgttttttcttcgtccttttggtttaaaaagtttcacgtcttggtgccttttgtgtgatgcgccttgctgatggcttgacatgtgcaattgtgagggacatgctcacctctagccttaaggggggcagggagtgatgatttgggggaggctttgggagcaaaataaggaagagggctgagctgagcttcggttctccagaatgtaagaaaacaaaatctaaaacaaaatctgaactctcaaaagtctatttttttaactgaaaatgtaaatttataaatatattcaggagttggaatgttgtagttacctactgagtaggcggcgatttttgtatgttatgaacatgcagttcattattttgtggttctattttactttgtacttgtgtttgcttaaacaaagtgactgtttggcttataaacacattgaatgcgctttattgcccatgggatatgtggtgtatatccttccaaaaaattaaaacgaaaataaagtagctgcgattgggtatgtgtttcctgggttaggggaaggactctgccctattgagggctgtgaggttttctgaagacttggcctttagagatacaaggatcctccagccagagtcaggcccactgtgtgaaactggagttcgttatttatgaggactgagtatgggnnnnnnnnnnnnnnnnnnnnnnnnnnnnnnnnnnnnnnnnnnnnnnnnnnnnnnnnnnnnnnnnnnnnnnnnnnnnnnnnnnnnnnnnnnnnnnnnnnnnnnnnnnnnnnnnnnnnnnnnnnnnnnnnnnnnnnnnnnnnnnnnnnnnnnnnnnnnnnnnnnnnnnnnnnnnnnnnnnnnnnnnnnnnnnnnnnnnnnnttcttgataatgggcctgttcctcttcagtctgttgggctgaagctttaccttggttagctaaagccaagaaaggcaagagttagggctgggacatgtgtggccaaaggcagtgttactctcctggcatcaaatgttgggccagtcccgtcccccacctctactcagggttggaaaacccatgatcttgggaatccctgccatgtgcagttagaggaggtaagaagtaggcacaaggcctttaggggaacagtaacaatgctggggccgactcagcctctccctcccattccccaggtccccagcaacttgagggcatcaaagaagcctagacgaggtaaaggccagttctcaagccaagaatccttccaggaagaaattcttattacttgccagctggaactgccatccttggcagcttcgtgggacaaaggatagagtgggcagaagcctggcctggtgtctaaagttcccatccgggccaaatctgttcccattgtgtaggaggcctgaggttctaggttcttttgggcc

SEQ ID NO: 350 - DNA, 3048 bp, Homo sapiens
cgccaccgcggaggacaggtgcagctggcgggcagcgggtgagggggtggcggggacgcgagtggcggccgcggggccccggacaagggtccgcagagctgcagccttcgagggccagccctctccgagtccggggctgggtcccaccagtgacaaggcggcagccccgcgcacaccaaagagaaggcggctgtggcggcagcggcagccccagccatgctgtgttatgtgacgaggccggacgcggtgctgatggaggtggaggtggaggcgaaagccaacggcgaggactgcctcaaccaggtgtgcaggcgactgggaatcatagaagttgactattttggactgcagtttacgggtagcaaaggtgaaagtttatggctaaacctgagaaaccggatctcccagcagatggatgggctagccccttacaggcttaaacttagagtcaagttcttcgtggagcctcatctcatcttacaggagcagactaggcatatctttttcttgcacatcaaggaggccctcttggcaggccacctcttgtgttccccagagcaggcagtggaactcagtgccctcctggcccagaccaagtttggagactacaaccagaacactgccaagtataactatgaggagctctgtgccaaggagctctcctctgccaccttgaacagcattgttgcaaaacataaggagttggaggggaccagccaggcttcagctgaataccaagttttgcagattgtgtcggcaatggaaaactatggcatagaatggcattctgtgcgggatagcgaagggcagaaactgctcattggggttggacctgaaggaatctcaatttgtaaagatgactttagcccaattaataggatagcttatcctgtggtgcagatggccacccagtcaggaaagaatgtatatttgacggtcaccaaggaatctgggaacagcatcgtgctcttgtttaaaatgatcagcaccagggcggccagcgggctctaccgagcgataacagagacgcacgcattctacaggtgtgacacagtgaccagcgccgtgatgatgcagtatagccgtgacttgaagggccacttggcatctctgtttctgaatgaaaacattaaccttggcaagaaatatgtctttgatattaaaagaacatcaaaggaggtgtatgaccatgccaggagggctctgtacaatgctggcgttgtggacctcgtttcaagaagcaaccagagcccttcacactcgcctctgaagtcctcagaaagcagcatgaactgcagcagctgcgagggcctcagctgccagcagacccgggtgctgcaggagaagctacgcaagctgaaggaagccatgctgtgcatggtgtgctgcgaggaggagatcaactccaccttctgtccctgtggccacactgtgtgctgtgagagctgcgccgcccagctacagtcatgtcccgtctgcaggtcgcgtgtggagcatgtccagcacgtctatctgccaacgcacaccagtcttctcaatctgactgtaatctaatctgttgtgcttttgttggacttggcatgtttccatgaactgcactattataaactattaaaatgatagattgtggagaaagtaattattccaacacccatctgccatgcgatgttaaaaaaaaaaaaaaggaagaaaaataacacagctactcctcactgcaaaaacatatccatgcgtagaatcaacaactccagtcatgggaccaggaggagctctgggacgcagacacattccttggatgttgattttttttatgatctagtaaaggaataggtaaagtctttgatgtcagtgaagtggcaacatagccaaaaagttgggtaccttttaggaaatgatgttgtaagtctccttaatgtatcctgaggtaagtttcctactggcagcagattttgtaagaattacttttaagaatttcattctttttgtatggtcatggagctccaaccatttttaataggaaagtcttttgtaaattgttgtcgttttaatgtcatttctgtctttataacttgatcaagaatgattggaaggcaaacaggtttacaaatcaattctgtgacttttaaaaagttgacaatgttgtcagatttaaaccagtgtggctagtaaaaagcagctcactcaatgtgggtggctccctattcctttacgctccccctatccctaccccacaagcctttcgattataaaatactaccaatcttgttataagattactgtggagtagtcaagtactccccgggccttctgagctggtggaatattttatttcagactgaaaacagagagcactctccttgggaagggaaagcggagcttgctgagtgagagatggagcctcatggtgtacaactgagggtagttaactcatcacttctcccaagcactcgatcccagcttcacccactggtgttgctttgcttgaactgttcaagccttttatagccttaccataagtatttagatatggtgtccttttctgtttttggggggggagttttgttgtgtttttttaaagtaagtgcttaagtattaactttgggttgtcccctctgtatgtttcgaaggggttttggttctttttgcttctgttttcttaaacatgttttccactcccacttgggcattttggaagctggtcagctagcaggttttctgggatgtcgggagacctagatgaccttatcgggtgcaatactagctaaggtaaagctagaaacctacactgtcactttactgagatttctgagtatacttttcatattgccttaatgtagcagtaatgtgtttatgcatttgtttctttgcacagacattttgtcaaatattaaaactctacttttttatggcacatattagcatataagcctttattccaagaggtatttattttttcacttgtaaaaaaataatgtttccacgtaaagaactctgttatatcctagaggactctgtcttttatattcgggataataaagactttaaagc

SEQ ID NO: 351 - DNA, 1240 bp, Homo sapiens
cggagctaccaaaggagtgggggacgagggccgggctgcgggcgaccgccgcagcgcaggccgcgatatcgcagcggatcggagcaggccggaggggcaattaagaccccggccgtgtgcgtccggcctcagcagccccgccgctcggcggacacgcagaccccgccggcccgggcgcgaacactcagcgcacccccgttccacttggtcccgccgcgccttccggtgcgccttccggtgcgccttccgctccgccccttcaggcaggaagtgtcggcgccgccactgtccggccacagcctaacgctcttcgctgtcgtttgtggtctcgcgcagggcggccccggttctggtgtttggcgtcggaattaaacaaccaccatgtcgagcaaaaaggcaaagaccaagaccaccaagaagcgccctcagcgtgcaacatccaatgtgtttgccatgtttgaccagtcacagattcaggagttcaaagaggccttcaacatgattgatcagaacagagatggcttcatcgacaaggaagatttgcatgatatgcttgcttctctagggaagaatcccactgatgcataccttgatgccatgatgaatgaggccccagggcccatcaatttcaccatgttcctgaccatgtttggtgagaagttaaatggcacagatcctgaagatgtcatcagaaacgcctttgcttgctttgatgaagaagcaacaggcaccattcaggaagattacctaagagagctgctgacaaccatgggggatcggtttacagatgaggaagtggatgagctgtacagagaagcacctattgacaaaaaggggaatttcaattacatcgagttcacacgcatcctgaaacatggagccaaagacaaagatgactgaaagaactttagctaaaatcttccagttacattgtcttactctcttttacttctcagacacttcccccaccctcatagaacctgttgcatgcaacttagtttcacagctttgcctcttctttttgatgtatttattccagacctttctgccacttagcacttgtataatcagactggaaatggggatgagggtgtaaattgtattgaaaaagatcgcgaataaaaatcaacaaatgtgaaagcccagaaaaatatattcgtatttctggttttgctggatttttacatttttatataataaaaatgttattttgaaataaagattatgctgactcaaatgc

SEQ ID NO: 352 - DNA, 948 bp, Homo sapiens
tttgcggcatcctgtggtataggggaagcgctccgggcctggaatccctacgcgtccctttgggtttagcacgatgagctcaatcggcactgggtatgacctgtcagcctctacattctctcctgacggaagagtttttcaagttgaatatgctatgaaggctgtggaaaatagtagtacagctattggaatcagatgcaaagatggtgttgtctttggggtagaaaaattagtcctttctaaactttatgaagaaggttccaacaaaagactttttaatgttgatcggcatgttggaatggcagtagcaggtttgttggcagatgctcgttctttagcagacatagcaagagaagaagcttccaacttcagatctaactttggctacaacattccactaaaacatcttgcagacagagtggccatgtatgtgcatgcatatacactctacagtgctgttagaccttttggctgcagtttcatgttagggtcttacagtgtgaatgacggtgcgcaactctacatgattgacccatcaggtgtttcatacggttattggggctgtgccatcggcaaagccaggcaagctgcaaagacggaaatagagaagcttcagatgaaagaaatgacctgccgtgatatcgttaaagaagttgcaaaaataatttacatagtacatgacgaagttaaggataaagcttttgaactagaactcagctgggttggtgaattaactaatggaagacatgaaattgttccaaaagatataagagaagaagcagagaaatatgctaaggaatctctgaaggaagaagatgaatcagatgatgataatatgtaacatttactccagcatctattgtattttaaatttctactccagtccaatgtaactatttagccctggattatacatactgtccaattttcattaaatttttgtcttac

SEQ ID NO: 353 - DNA, 1686 bp, Homo sapiens
gcgcgctcgggtacctgtaccccacgtagtcgccggttaccgatcggactaagttccagaagcaagagataaagtaataatgggtactgtggggaaaaacacagaagaacaattcggtaatatagtggtgatttacaagtcaagttaaaatgtccccagaagtggccttgaaccgaatatctccaatgctctcccctttcatatctagcgtggtccggaatggaaaagtgggactggatgctacaaactgtttgaggataactgacttaaaatctggctgcacatcattgactcctgggcccaactgtgaccgatttaaactgcacataccatatgctggagagacattaaagtgggatatcattttcaatgcccaatacccagaactgcctcccgattttatctttggagaagatgctgaattcctgccagacccctcagctttgcagaatcttgcctcctggaatccttcaaatcctgaatgtctcttacttgtggtgaaggaacttgtgcaacaatatcaccaattccaatgtagccgcctccgggagagctcccgcctcatgtttgaataccagacattactggaggagccacagtatggagagaacatggaaatttatgctgggaaaaaaaacaactggactggtgaattttcagctcgtttccttttgaagctgcccgtagatttcagcaatatccccacataccttctcaaggatgtaaatgaagaccctggagaagatgtggccctcctctctgttagttttgaggacactgaagccacccaggtgtaccccaagctgtacttgtcacctcgaattgagcatgcacttggaggctcctcagctcttcatatcccagcttttccaggaggaggatgtctcattgattacgttcctcaagtatgccacctgctcaccaacaaggtgcagtacgtgattcaagggtatcacaaaagaagagagtatattgctgcttttctcagtcactttggcacaggtgtcgtggaatatgatgcagaaggctttacaaaactcactctgctgctgatgtggaaagatttttgttttcttgtacacattgacctgcctctgtttttccctcgagaccagccaactctcacatttcagtccgtttatcactttaccaacagtggacagctttactcccaggcccaaaaaaattatccgtacagccccagatgggatggaaatgaaatggccaaaagagcaaaggcttatttcaaaacctttgtccctcagttccaggaggcagcatttgccaatggaaagctctaggaaacaccagtcttgagaggtggccagccagactgcctgtccacatgcgtgtcagcacatacagccgcttcctggaagccgcctggaatgtcttcacggcagcgttttgctcacacagcagcttttgcacgccccaggcagccccgactgctgaaatccaacttgagctggctggtggtccctggatcctagagcccttcacttcgggttactccctctttcttgcctctatttcttagttggaagaaataaactcacaaattatggtgcagtaattttccggggaaagtaaagcctcaggaatgcccacgcctttcttccaaagcctttgtctctgagacctcttaagttctaagattaaatgcccctcgctgttcttcctctg

SEQ ID NO: 354 - DNA, 661 bp, Homo sapiens
  modified_base (40): a, t, c, g, other or unknown
  modified_base (459)..(482): a, t, c, g, other or unknown
tgcaccctgagctcaatggggctgcctataggtacccgcnccacgccccttctcctggccaaaccgtcaagcccgaggcggatagagaccacgccagtgaccagttgtagcccgggaggagctctccagcctcggcgcctgggcagagggcccggaaaccctcggaccagagtgtgtggaggaggcatctgtgtggtggccctggcactgcagagactggtccgggctgtcaggaggcgggagggggcagcgctgggcctcgtgtcgcttgtcgtcgtccgtcctgtgggcgctctgccctgtgtccttcgcgttcctcgttaagcagaagaagtcagtagttattctcccatgaacgttcttgtctgtgtacagtttttagaacattacaaaggatctgtttgcttagctgtcaacaaaaagaaaacctgaaggagcatttggaagtcaatttgaggnnnnnnnnnnnnnnnnnnnnnnnnttgtatgttggaacgtgccccagaatgaggcagttggcaaacttctcaggacaatgaatcctcccgtttttcttttatgccacacagtgcattgttttttctacctgcttgtcttatttttagaataatttagaaaaacaaaacaaaggctgtttttcctaattttggcagaacccccc

SEQ ID NO: 355 - DNA, 3049 bp, Homo sapiens
cccgcgggcaggggcggcgagtgcgcgggccgccgcccttctcggcgggcagcgcgcgaggaccaggccgaggaggaagtggcggcggcggcggcgggctccccgcccgaggaggaagatgcagacctttctgaaagggaagagagttggctactggctgagcgagaagaaaatcaagaagctgaatttccaggctttcgccgagctgtgcaggaagcgagggatggaggttgtgcagctgaaccttagccggccgatcgaggagcagggccccctggacgtcatcatccacaagctgactgacgtcatccttgaagccgaccagaatgatagccagtccctggagctggtgcacaggttccaggagtacatcgatgcccaccctgagaccatcgtcctggacccgctccctgccatcagaaccctgcttgaccgctccaagtcctatgagctcatccggaagattgaggcctacatggaagacgacaggatctgctcgccacccttcatggagctcacgagcctgtgcggggatgacaccatgcggctgctggagaagaacggcttgactttcccattcatttgcaaaaccagagtggctcatggcaccaactctcacgagatggctatcgtgttcaaccaggagggcctgaacgccatccagccaccctgcgtggtccagaatttcatcaaccacaacgccgtcctgtacaaggtgttcgtggttggcgagtcctacaccgtggtccagaggccctcactcaagaacttctccgcaggcacatcagaccgtgagtccatcttcttcaacagccacaacgtgtcaaagccggagtcgtcatcggtcctgacggagctggacaagatcgagggcgtgttcgagcggccgagcgacgaggtcatccgggagctctcccgggccctgcggcaggcactgggcgtgtcactcttcggcatcgacatcatcatcaacaaccagacagggcagcacgccgtcattgacatcaatgccttcccaggctacgagggcgtgagcgagttcttcacagacctcctgaaccacatcgccactgtcctgcagggccagagcacagccatggcagccacaggggacgtggccctgctgaggcacagcaagcttctggccgagccggcgggcggcctggtgggcgagcggacatgcaacgccagccccggctgctgcggcagcatgatgggccaggacgcgccctggaaagctgaggccgacgcgggcggcaccgccaagctgccgcaccagagactcggctgcaacgccggcgtgtctcccagcttccagcagcattgtgtggcctccctggccaccaaggcctcctcccagtagccacggagccgggacccagagggcagcgcaggcgcaggagcacacccgctgggccagcagctcccaacggcgatgctactactaagaatccccagtgatctgattcttctgttttttaatttttaacctgattttctgatgtcatgatctaaatgaggggtagaagagagtaccaggtggtccaccgttggggagcggggccgtccgcctgctctctactgtgcagacctcctaactgagtttacacacgcttgtgttgcaacactaggtctggatgggaggtgaggggggtgcgtatactgccatgccagtgtctgtgcacatccctgtctgttgtctccatggccactgtggactgggacccttgaagcctgcccatgtgggtgtgggaggctgatcagtgcgtgtgagagtggcttcccttctgcctgactccccactccctgacctgccccttccttgtttttcctcctactggtctccaccaaggctttgttagcccccaccctgcctggtgtgcagctaacccctccctccccacagccagaggaggccacagacccctcagggagttccgcgctggggtctgggctgtgctccctcactaaagggaaggaaaggaagctgggcgtcctccgggccccccaacacacgtcccatttagccctgcacagcggtctccttcccctaagccagcactgctgctccctggagccgggaaggaggctgcctggctggaggccgagccgatgggcctgtgctgaggatttgtgctgtgatttgggcaaatcattccaggtctttgggcctccaccccctcgtctctagtggacatttgagatcagagagcaccacagggctggctttgtgccctaacccctgggatgcagcctgcctttccataaagtcacctaggtgaggataggcgcgggagcctcggcatgacaccatggagatcggggccctcttcccagtgggttcactccttttcacacctgctgggtccctcctcgcccagcaggcctggtccacctctcattgcaagcccgcaagcactgagccgagtaaggtgcttagtgtgagccacccgccccccatagcttctgcacacctcagactcaccccatcaccttggcagcaaagcactgctctgccgtctgacccctgatccaggcagcagccccctccgcagagaaaagggttggggagaagcctctgcagtcctggaagatgtggggtgctgggtgagaggcatcagcccccacaagtatgtttttgtgtcttaagatagcagtttactttgaaaaagtgaaaaaggcttccgggctgtcctctgcccagtgagatggaggacgctagagaaagtgctgagtgtcccgagagaggcccccgagccagtgcatggaggtcttcggcctggctcagctgggctgcaggatgcccactttgaggagggaggcacagggcttgggcgaggggcagaggccatcagaactgcccggcttttttggaaactgaggacccaacaactaaccacgtttacacgacttgagttttgaaccccgattaatgtctgtacgtcacctttcctagttctgaccctgagccctggggaacaggaaagcgtggctggcctcttgcactgctttgtctccaaaataaactactgaaatcaaaccgcatttc

SEQ ID NO: 356 - DNA, 14889 bp, Homo sapiens
cagcggtgcgagctccaggcccatgcactgaggaggcggaaacaaggggagcccccagagctccatcaagccccctccaaaggctcccctacccggtccacgccccccaccccccctccccgcctcctcccaattgtgcatttttgcagccggaggcggctccgagatggggctgtgagcttcgcccggggagggggaaagagcagcgagagtgaagcggggggtgggtgaagggtttggatttcggggcagggggcgcacccccgtcagcaggccctccccaaggggctcggaactctacctcttcacccacgcccctggtgcgctttgccgaaggaaagaataagaacagagaaggaggagggggaaaggaggaaaagggggaccccccaactggggggggtgaaggagagaagtagcaggaccagaggggaaggggctgctgcttgcatcagcccacaccatgctgaccccgccgttgctcctgctgctgcccctgctctcagctctggtcgcggcggctatcgacgcccctaagacttgcagccccaagcagtttgcctgcagagatcaaataacctgtatctcaaagggctggcggtgcgacggtgagagggactgcccagacggatctgacgaggcccctgagatttgtccacagagtaaggcccagcgatgccagccaaacgagcataactgcctgggtactgagctgtgtgttcccatgtcccgcctctgcaatggggtccaggactgcatggacggctcagatgaggggccccactgccgagagctccaaggcaactgctctcgcctgggctgccagcaccattgtgtccccacactcgatgggcccacctgctactgcaacagcagctttcagcttcaggcagatggcaagacctgcaaagattttgatgagtgctcagtgtacggcacctgcagccagctatgcaccaacacagacggctccttcatatgtggctgtgttgaaggatacctcctgcagccggataaccgctcctgcaaggccaagaacgagccagtagaccggccccctgtgctgttgatagccaactcccagaacatcttggccacgtacctgagtggggcccaggtgtctaccatcacacctacgagcacgcggcagaccacagccatggacttcagctatgccaacgagaccgtatgctgggtgcatgttggggacagtgctgctcagacgcagctcaagtgtgcccgcatgcctggcctaaagggcttcgtggatgagcacaccatcaacatctccctcagtctgcaccacgtggaacagatggccatcgactggctgacaggcaacttctactttgtggatgacatcgatgataggatctttgtctgcaacagaaatggggacacatgtgtcacattgctagacctggaactctacaaccccaagggcattgccctggaccctgccatggggaaggtgtttttcactgactatgggcagatcccaaaggtggaacgctgtgacatggatgggcagaaccgcaccaagctcgtcgacagcaagattgtgtttcctcatggcatcacgctggacctggtcagccgccttgtctactgggcagatgcctatctggactatattgaagtggtggactatgagggcaagggccgccagaccatcatccagggcatcctgattgagcacctgtacggcctgactgtgtttgagaattatctctatgccaccaactcggacaatgccaatgcccagcagaagacgagtgtgatccgtgtgaaccgctttaacagcaccgagtaccaggttgtcacccgggtggacaagggtggtgccctccacatctaccaccagaggcgtcagccccgagtgaggagccatgcctgtgaaaacgaccagtatgggaagccgggtggctgctctgacatctgcctgctggccaacagccacaaggcgcggacctgccgctgccgttccggcttcagcctgggcagtgacgggaagtcatgcaagaagccggagcatgagctgttcctcgtgtatggcaagggccggccaggcatcatccggggcatggatatgggggccaaggtcccggatgagcacatgatccccattgaaaacctcatgaacccccgagccctggacttccacgctgagaccggcttcatctactttgccgacaccaccagctacctcattggccgccagaagattgatggcactgagcgggagaccatcctgaaggacggcatccacaatgtggagggtgtggccgtggactggatgggagacaatctgtactggacggacgatgggcccaaaaagacaatcagcgtggccaggctggagaaagctgctcagacccgcaagactttaatcgagggcaaaatgacacaccccagggctattgtggtggatccactcaatgggtggatgtactggacagactgggaggaggaccccaaggacagtcggcgtgggcggctggagagggcgtggatggatggctcacaccgagacatctttgtcacctccaagacagtgctttggcccaatgggctaagcctggacatcccggctgggcgcctctactgggtggatgccttctacgaccgcatcgagacgatactgctcaatggcacagaccggaagattgtgtatgaaggtcctgagctgaaccacgcctttggcctgtgtcaccatggcaactacctcttctggactgagtatcggagtggcagtgtctaccgcttggaacggggtgtaggaggcgcaccccccactgtgacccttctgcgcagtgagcggccccccatctttgagatccgaatgtatgatgcccagcagcagcaagttggcaccaacaaatgccgggtgaacaatggcggctgcagcagcctgtgcttggccacccctgggagccgccagtgcgcctgtgctgaggaccaggtgttggacgcagacggcgtcacttgcttggcgaacccatcctacgtgcctccaccccagtgccagccaggcgagtttgcctgtgccaacagccgctgcatccaggagcgctggaagtgtgacggagacaacgattgcctggacaacagtgatgaggccccagccctctgccatcagcacacctgcccctcggaccgattcaagtgcgagaacaaccggtgcatccccaaccgctggctctgcgacggggacaatgactgtgggaacagtgaagatgagtccaatgccacttgttcagcccgcacctgcccccccaaccagttctcctgtgccagtggccgctgcatccccatctcctggacgtgtgatctggatgacgactgtggggaccgctctgatgagtctgcttcgtgtgcctatcccacctgcttccccctgactcagtttacctgcaacaatggcagatgtatcaacatcaactggagatgcgacaatgacaatgactgtggggacaacagtgacgaagccggctgcagccactcctgttctagcacccagttcaagtgcaacagcgggcgttgcatccccgagcactggacctgcgatggggacaatgactgcggagactacagtgatgagacacacgccaactgcaccaaccaggccacgaggccccctggtggctgccacactgatgagttccagtgccggctggatggactatgcatccccctgcggtggcgctgcgatggggacactgactgcatggactccagcgatgagaagagctgtgagggagtgacccacgtctgcgatcccagtgtcaagtttggctgcaaggactcagctcggtgcatcagcaaagcgtgggtgtgtgatggcgacaatgactgtgaggataactcggacgaggagaactgcgagtccctggcctgcaggccaccctcgcacccttgtgccaacaacacctcagtctgcctgccccctgacaagctgtgtgatggcaacgacgactgtggcgacggctcagatgagggcgagctctgcgaccagtgctctctgaataacggtggctgcagccacaactgctcagtggcacctggcgaaggcattgtgtgttcctgccctctgggcatggagctggggcccgacaaccacacctgccagatccagagctactgtgccaagcatctcaaatgcagccaaaagtgcgaccagaacaagttcagcgtgaagtgctcctgctacgagggctgggtcctggaacctgacggcgagagctgccgcagcctggaccccttcaagccgttcatcattttctccaaccgccatgaaatccggcgcatcgatcttcacaaaggagactacagcgtcctggtgcccggcctgcgcaacaccatcgccctggacttccacctcagccagagcgccctctactggaccgacgtggtggaggacaagatctaccgcgggaagctgctggacaacggagccctgactagtttcgaggtggtgattcagtatggcctggccacacccgagggcctggctgtagactggattgcaggcaacatctactgggtggagagtaacctggatcagatcgaggtggccaagctggatgggaccctccggaccaccctgctggccggtgacattgagcacccaagggcaatcgcactggatccccgggatgggatcctgttttggacagactgggatgccagcctgccccgcattgaggcagcctccatgagtggggctgggcgccgcaccgtgcaccgggagaccggctctgggggctggcccaacgggctcaccgtggactacctggagaagcgcatcctttggattgacgccaggtcagatgccatttactcagcccgttacgacggctctggccacatggaggtgcttcggggacacgagttcctgtcgcacccgtttgcagtgacgctgtacgggggggaggtctactggactgactggcgaacaaacacactggctaaggccaacaagtggaccggccacaatgtcaccgtggtacagaggaccaacacccagccctttgacctgcaggtgtaccacccctcccgccagcccatggctcccaatccctgtgaggccaatgggggccagggcccctgctcccacctgtgtctcatcaactacaaccggaccgtgtcctgcgcctgcccccacctcatgaagctccacaaggacaacaccacctgctatgagtttaagaagttcctgctgtacgcacgtcagatggagatccgaggtgtggacctggatgctccctactacaactacatcatctccttcacggtgcccgacatcgacaacgtcacagtgctagactacgatgcccgcgagcagcgtgtgtactggtctgacgtgcggacacaggccatcaagcgggccttcatcaacggcacaggcgtggagacagtcgtctctgcagacttgccaaatgcccacgggctggctgtggactgggtctcccgaaacctgttctggacaagctatgacaccaataagaagcagatcaatgtggcccggctggatggctccttcaagaacgcagtggtgcagggcctggagcagccccatggccttgtcgtccaccctctgcgtgggaagctctactggaccgatggtgacaacatcagcatggccaacatggcatggcagcaatcgcaccctgctcttcagtggccagaagggccccgtgggcctggctattgacttccctgaaagcaaactctactggatcagctccgggaaccataccatcaaccgctgcaacctggatgggagtgggctggaggtcatcgatgccatgcggagccagctgggcaaggccaccgccctggccatcatgggggacaagctgtggtgggctgatcaggtgtcggaaaagatgggcacatgcagcaaggctgacggctcgggctccgtggtccttcggaacagcaccaccctggtgatgcacatgaaggtctatgacgagagcatccagctggaccataagggcaccaacccctgcagtgtcaacaacggtgactgctcccagctctgcctgcccacgtcagagacgacccgctcctgcatgtgcacagccggctatagcctccggagtggccagcaggcctgcgagggcgtaggttcctttctcctgtactctgtgcatgagggaatcaggggaattcccctggatcccaatgacaagtcagatgccctggtcccagtgtccgggacctcgctggctgtcggcatcgacttccacgctgaaaatgacaccatctactgggtggacatgggcctgagcacgatcagccgggccaagcgggaccagacgtggcgtgaagacgtggtgaccaatggcattggccgtgtggagggcattgcagtggactggatcgcaggcaacatctactggacagaccagggctttgatgtcatcgaggtcgcccggctcaatggctccttccgctacgtggtgatctcccagggtctagacaagccccgggccatcaccgtccacccggagaaagggtacttgttctggactgagtggggtcagtatccgcgtattgagcggtctcggctagatggcacggagcgtgtggtgctggtcaacgtcagcatcagctggcccaacggcatctcagtggactaccaggatgggaagctgtactggtgcgatgcacggacagacaagattgaacggatcgacctggagacaggtgagaaccgcgaggtggttctgtccagcaacaacatggacatgttttcagtgtctgtgtttgaggatttcatctactggagtgacaggactcatgccaacggctctatcaagcgcgggagcaaagacaatgccacagactccgtgcccctgcgaaccggcatcggcgtccagcttaaagacatcaaagtcttcaaccgggaccggcagaaaggcaccaacgtgtgcgcggtggccaatggcgggtgccagcagctgtgcctgtaccggggccgtgggcagcgggcctgcgcctgtgcccacgggatgctggctgaagacggagcatcgtgccgcgagtatgccggctacctgctctactcagagcgcaccattctcaagagtatccacctgtcggatgagcgcaacctcaatgcgcccgtgcagcccttcgaggaccctgagcacatgaagaacgtcatcgccctggcctttgactaccgggcaggcacctctccgggcacccccaatcgcatcttcttcagcgacatccactttgggaacatccaacagatcaacgacgatggctccaggaggatcaccattgtggaaaacgtgggctccgtggaaggcctggcctatcaccgtggctgggacactctctattggacaagctacacgacatccaccatcacgcgccacacagtggaccagacccgcccaggggccttcgagcgtgagaccgtcatcactatgtctggagatgaccacccacgggccttcgttttggacgagtgccagaacctcatgttctggaccaactggaatgagcagcatcccagcatcatgcgggcggcgctctcgggagccaatgtcctgacccttatcgagaaggacatccgtacccccaatggcctggccatcgaccaccgtgccgagaagctctacttctctgacgccaccctggacaagatcgagcggtgcgagtatgacggctcccaccgctatgtgatcctaaagtcagagcctgtccaccccttcgggctggccgtgtatggggagcacattttctggactgactgggtgcggcgggcagtgcagcgggccaacaagcacgtgggcagcaacatgaagctgctgcgcgtggacatcccccagcagcccatgggcatcatcgccgtggccaacgacaccaacagctgtgaactctctccatgccgaatcaacaacggtggctgccaggacctgtgtctgctcactcaccagggccatgtcaactgctcatgccgagggggccgaatcctccaggatgacctcacctgccgagcggtgaattcctcttgccgagcacaagatgagtttgagtgtgccaatggcgagtgcatcaacttcagcctgacctgcgacggcgtcccccactgcaaggacaagtccgatgagaagccatcctactgcaactcccgccgctgcaagaagactttccggcagtgcagcaatgggcgctgtgtgtccaacatgctgtggtgcaacggggccgacgactgtggggatggctctgacgagatcccttgcaacaagacagcctgtggtgtgggcgagttccgctgccgggacgggacctgcatcgggaactccagccgctgcaaccagtttgtggattgtgaggacgcctcagatgagatgaactgcagtgccaccgactgcagcagctacttccgcctgggcgtgaagggcgtgctcttccagccctgcgagcggacctcactctgctacgcacccagctgggtgtgtgatggcgccaatgactgtggggactacagtgatgagcgcgactgcccaggtgtgaaacgccccagatgccctctgaattacttcgcctgccctagtgggcgctgcatccccatgagctggacgtgtgacaaagaggatgactgtgaacatggcgaggacgagacccactgcaacaagttctgctcagaggcccagtttgagtgccagaaccatcgctgcatctccaagcagtggctgtgtgacggcagcgatgactgtggggatggctcagacgaggctgctcactgtgaaggcaagacgtgcggcccctcctccttctcctgccctggcacccacgtgtgcgtccccgagcgctggctctgtgacggtgacaaagactgtgctgatggtgcagacgagagcatcgcagctggttgcttgtacaacagcacttgtgacgaccgtgagttcatgtgccagaaccgccagtgcatccccaagcacttcgtgtgtgaccacgaccgtgactgtgcagatggctctgatgagtcccccgagtgtgagtacccgacctgcggccccagtgagttccgctgtgccaatgggcgctgtctgagctcccgccagtgggagtgtgatggcgagaatgactgccacgaccagagtgacgaggctcccaagaacccacactgcaccagcccagagcacaagtgcaatgcctcgtcacagttcctgtgcagcagtgggcgctgtgtggctgaggcactgctctgcaacggccaggatgactgtggcgacagctcggacgagcgtggctgccacatcaatgagtgtctcagccgcaagctcagtggctgcagccaggactgtgaggacctcaagatcggcttcaagtgccgctgtcgccctggcttccggctgaaggacgacggccggacgtgtgctgatgtggacgagtgcagcaccaccttcccctgcagccagcgctgcatcaacacccatggcagctataagtgtctgtgtgtggagggctatgcaccccgcggcggcgacccccacagctgcaaggctgtgactgacgaggaaccgtttctgatcttcgccaaccggtactacctgcgcaagctcaacctggacgggtccaactacacgttacttaagcagggcctgaacaacgccgttgccttggattttgactaccgagagcagatgatctactggacagatgtgaccacccagggcagcatgatccgaaggatgcaccttaacgggagcaatgtgcaggtcctacaccgtacaggcctcagcaaccccgatgggctggctgtggactgggtgggtggcaacctgtactggtgcgacaaaggccgggacaccatcgaggtgtccaagctcaatggggcctatcggacggtgctggtcagctctggcctccgtgagcccagggctctggtggtggatgtgcagaatgggtacctgtactggacagactggggtgaccattcactgatcggccgcatcggcatggatgggtccagccgcagcgtcatcgtggacaccaagatcacatggcccaatggcctgacgctggactatgtcactgagcgcatctactgggccgacgcccgcgaggactacattgaatttgccagcctggatggctccaatcgccacgttgtgctgagccaggacatcccgcacatctttgcactgaccctgtttgaggactacgtctactggaccgactgggaaacaaagtccattaaccgagcccacaagaccacgggcaccaacaaaacgctcctcatcagcacgctgcaccggcccatggacctgcatgtcttccatgccctgcgccagccagacgtgcccaatcacccctgcaaggtcaacaatggtggctgcagcaacctgtgcctgctgtcccccgggggagggcacaaatgtgcctgccccaccaacttctacctgggcagcgatgggcgcacctgtgtgtccaactgcacggctagccagtttgtatgcaagaacgacaagtgcatccccttctggtggaagtgtgacaccgaggacgactgcggggaccactcagacgagcccccggactgccctgagttcaagtgccggcccggacagttccagtgctccacaggtatctgcacaaaccctgccttcatctgcgatggcgacaatgactgccaggacaacagtgacgaggccaactgtgacatccacgtctgcttgcccagtcagttcaaatgcaccaacaccaaccgctgtattcccggcatcttccgctgcaatgggcaggacaactgcggagatggggaggatgagagggactgccccgaggtgacctgcgcccccaaccagttccagtgctccattaccaaacggtgcatcccccgggtctgggtctgcgaccgggacaatgactgtgtggatggcagtgatgagcccgccaactgcacccagatgacctgtggtgtggacgagttccgctgcaaggattcgggccgctgcatcccagcgcgttggaagtgtgacggagaggatgactgtggggatggctcggatgagcccaaggaagagtgtgatgaacgcacctgtgagccataccagttccgctgcaagaacaaccgctgcgtgcccggccgctggcagtgcgactacgacaacgattgcggtgacaactccgatgaagagagctgcacccctcggccctgctccgagagtgagttctcctgtgccaacggccgctgcatcgcggggcgctggaaatgcgatggagaccacgactgcgcggacggctcggacgagaaagactgcaccccccgctgtgacatggaccagttccagtgcaagagcggccactgcatccccctgcgctggcgctgtgacgcagacgccgactgcatggacggcagcgacgaggaggcctgcggcactggcgtgcggacctgccccctggacgagttccagtgcaacaacaccttgtgcaagccgctggcctggaagtgcgatggcgaggatgactgtggggacaactcagatgagaaccccgaggagtgtgcccggttcgtgtgccctcccaaccggcccttccgttgcaagaatgaccgcgtctgtctgtggatcgggcgccaatgcgatggcacggacaactgtggggatgggactgatgaagaggactgtgagccccccacagcccacaccacccactgcaaagacaagaaggagtttctgtgccggaaccagcgctgcctctcctcctccctgcgctgcaacatgttcgatgactgcggggacggctctgacgaggaggactgcagcatcgaccccaagctgaccagctgcgccaccaatgccagcatctgtggggacgaggcacgctgcgtgcgcaccgagaaagcggcctactgtgcctgccgctcgggcttccacaccgtgcccggccagcccggatgccaagacatcaacgagtgcctgcgcttcggcacctgctcccagctctgcaacaacaccaagggcggccacctctgcagctgcgctcggaacttcatgaagacgcacaacacctgcaaggccgaaggctctgagtaccaggtcctgtacatcgctgatgacaatgagatccgcagcctgttccccggccacccccattcggcttacgagcaggcattccagggtgacgagagtgtccgcattgatgctatggatgtccatgtcaaggctggccgtgtctattggaccaactggcacacgggcaccatctcctaccgcagcctgccacctgctgcgcctcctaccacttccaaccgccaccggcgacagattgaccggggtgtcacccacctcaacatttcagggctgaagatgcccagaggcatcgccatcgactgggtggccggaaacgtgtactggaccgactcgggccgagatgtgattgaggtggcgcagatgaagggcgagaaccgcaagacgctcatctcgggcatgattgacgagccccacgccattgtggtggacccactgagggggaccatgtactggtcagactggggcaaccaccccaagattgagacggcagcgatggatgggacgcttcgggagacactggtgcaggacaacattcagtggcccacaggcctggccgtggattatcacaatgagcggctgtactgggcagacgccaagctttcagtcatcggcagcatccggctcaatggcacggaccccattgtggctgctgacagcaaacgaggcctaagtcaccccttcagcatcgacgtctttgaggattacatctatggtgtcacctacatcaataatcgtgtcttcaagatccataagtttggccacagccccttggtcaacctgacagggggcctgagccacgcctctgacgtggtcctttaccatcagcacaagcagcccgaagtgaccaacccatgtgaccgcaagaaatgcgagtggctctgcctgctgagccccagtgggcctgtctgcacctgtcccaatgggaagcggctggacaacggcacatgcgtgcctgtgccctctccaacgccccccccagatgctccccggcctggaacctgtaacctgcagtgcttcaacggtggcagctgtttcctcaatgcacggaggcagcccaagtgccgctgccaaccccgctacacgggtgacaagtgtgaactggaccagtgctgggagcactgtcgcaatgggggcacctgtgctgcctccccctctggcatgcccacgtgccggtgccccacgggcttcacgggccccaaatgcacccagcaggtgtgtgcgggctactgtgccaacaacagcacctgcactgtcaaccagggcaaccagccccagtgccgatgcctacccggcttcctgggcgaccgctgccagtaccggcagtgctctggctactgtgagaactttggcacatgccagatggctgctgatggctcccgacaatgccgctgcactgcctactttgagggatcgaggtgtgaggtgaacaagtgcagccgctgtctcgaaggggcctgtgtggtcaacaagcagagtggggatgtcacctgcaactgcacggatggccgggtggcccccagctgtctgacctgcgtcggccactgcagcaatggcggctcctgtaccatgaacagcaaaatgatgcctgagtgccagtgcccaccccacatgacagggccccggtgtgaggagcacgtcttcagccagcagcagccaggacatatagcctccatcctaatccctctgctgttgtgctgctgctggttctggtggccggagtggtattctggtataagcggcgagtccaaggggctaagggcttccagcaccaacggatgaccaacggggccatgaacgtggagattggaaaccccacctacaagatgtacgaaggcggagagcctgatgatgtgggaggcctactggacgctgactttgccctggaccctgacaagcccaccaacttcaccaaccccgtgtatgccacactctacatggggggccatggcagtcgccactccctggccagcacggacgagaagcgagaactcctgggccggggccctgaggacgagataggggaccccttggcatagggccctgccccgtcggactgcccccagaaagcctcctgccccctgccggtgaagtccttcagtgagcccctccccagccagcccttccctggccccgccggatgtataaatgtaaaaatgaaggaattacattttatatgtgagcgagcaagccggcaagcgagcacagtattatttctccatcccctccctgcctgctccttggcacccccatgctgccttcagggagacaggcagggagggcttggggctgcacctcctaccctcccaccagaacgcaccccactgggagagctggtggtgcagccttcccctccctgtataagacactttgccaaggctctcccctctcgccccatccctgcttgcccgctcccacagcttcctgagggctaattctgggaagggagagttctttgctgcccctgtctggaagacgtggctctgggtgaggtaggcgggaaaggatggagtgttttagttcttgggggaggccaccccaaaccccagccccaactccaggggcacctatgagatggccatgctcaacccccctcccagacaggccctccctgtctccagggcccccaccgaggttcccagggctggagacttcctctggtaaacattcctccagcctcccctcccctggggacgccaaggaggtgggccacacccaggaagggaaagcgggcagccccgttttggggacgtgaacgttttaataatttttgctgaattcctttacaactaaataacacagatattgttataaataaattgtaaaaaaa

SEQ ID NO: 357 - DNA, 778 bp, Homo sapiens
ctttcttacaaataaagtttattgctgaatttccccattaacattatagaaaacactgaaatttcacaaattattgagagcccaacagttaaacatactttatttaaaaaagtacaaaagtgacattagaaatttttttgaagaaatgtgtatcatctaacagcaaagaaatatgaaccagataatgaatggcacaaatatagcactaaaggggtactcactaaaggggtactcagtcaccacccagaaattgtccgagttatgaaatagattcattttgagaagttacacattcagtttgtttatgaactagcctgtcttgtttctgcctcttgtaagaaaagagctaggtctttatgctgctaggacaaaatactgtacatgaattggagaataaggaggggtcatccttctccccggtaccggaacaagagaacagttagtacagaaatggctttggcactttaacccttagacattgtcccaaaccttgttacttgagtattgtagcctcaccatgattttttttaacaccgtatcatctccatactttttatttacaaattatatatacacacaataatacaattccttcattctaaaacaatagtagaccccaaacaggtctacattaagtttctgtattagcagttcactcagatagcttcgtttgtttgttgttgtttccacataaccgcactgatcatgccatacagttaatttttatttgtttatgctaccttctgagattgacttaaggctctagtttaatgcaaat

SEQ ID NO: 358 - DNA, 1289 bp, Homo sapiens
ggggcgggtggggaaggatcgcaggcgagattacgaggcgaggctcgcgcgcccgcccccgccctggcccccagtggcccacccggtccggcccggcacagccatgatcaaggcgatcctaatcttcaacaaccacgggaagccgcggctctccaagttctaccagccctacagtgaagatacacaacagcaaatcatcagggagactttccatttggtatctaagagagatgaaaatgtttgtaatttcctagaaggaggattattaattggaggatctgacaacaaactgatttatagacattatgcaacgttatattttgtcttctgtgtggattcttcagaaagtgaacttggcattttagatctaattcaagtatttgtggaaacattagacaaatgttttgaaaatgtctgtgagctggatttgattttccatgtagacaaggttcacaatattcttgcagaaatggtgatggggggaatggtattggagacaaatatgaatgagattgttacacaaattgatgcacaaaataagctggaaaaatctgaggctggcttagcaggagctccagcccgtgctgtatcagctgtaaagaatatgaatcttcctgagatcccaagaaatattaacattggtgacatcagtataaaagtgccaaacctgccctcttttaaataaaaatgtaaaaaggccactcccaggtaaaatccagggggaagagtcatctaagtttaccatgcagttgtttaccaaaaatagaggaggagagtcttaacttttgctcttggatttaagtcaaggtactgtatagaagttgtgtaaaatcagtatgaaagttcaatgttgctgttcttgctcagtgattttaaagaaattgagtagttcctatgtgatttttttttttcttttctaaactgcattcctgtgcccacctacggcatgcctctatgtattggctactacagtgttttaaaaagtgtttcagatatttctctaattatgtacaacctaaaatgttggtgttttgtatggatcacaagtgcagcattccttaattccttctgctatatgtcacacagttgttatttggagaaccaagtatgtattgcatgaaaacattatgacttttttctcttagtttaaataaactccaaggtaactggacttctaaagcacctttctgtttgcctgatatctactttagcaataattttttttacaaccctctgactcaacaaagtaaataaaagtatattttatcactaaaaaaaaaaaaaaaggg

SEQ ID NO: 359 - DNA, 1671 bp, Homo sapiens
gccgccgccattttagcgttttgtcagaagcgtccgcgccgcgaggaggaggccctgctggtttctgtgcgggctcttgtcaggatggtgaagctgttcatcggaaacctgccccgggaggctacagagcaggagattcgctcactcttcgagcagtatgggaaggtgctggaatgtgacatcattaagaattacgggctttgtgcacatagaagacaagacggcagctgaggatgccatacgcaacctgcaccattacaagcttcatggggtgaacatcaacgtggaagccagcaagaataagagcaaaacctcaacaaagttgcatgtgggcaacatcagtcccacctgcaccaataaggagcttcgagccaagtttgaggagtatggtccggtcatcgaatgtgacatcgtgaaagattatgccttcgtacacatggagcgggcagaggatgcagtggaggccatcaggggccttgataacacagagtttcaaggcaaacgaatgcacgtgcagttgtccaccagccggcttaggactgcgcccgggatgggagaccagagcggctgctatcggtgcgggaaagaggggcactggtccaaagagtgtccgatagatcgttcaggccgcgtggcagacttgaccgagcaatataatgagcaatacggagcagtgcgtacgccttacaccatgagctatggggattcattgtattacaacaacgcgtacggagcgctcgatgcctactacaagcgctgccgtgctgcccggtcctatgaggcagtggcagctgcagctgcctccgtgtataattacgcagagcagaccctgtcccagctgccacaagtccagaatacagccatggccagtcacctcacctccacctctctcgatccctacgatagacacctgttgccgacctcaggagctgctgccacagctgctgctgcagcagcagccggctgctgctgttactgcagcttccacttcatattacgggcgggatcggagccccctgcgtcgcgctacagccccagtccccactgttggagagggctacggttacgggcatgagagtgagttgtcccaagcttcagcagccgcgcggaattctctgtacgacatggcccggtatgagcgggagcagtatgccgatcgggcgcggtactcagccttttaaagcttgaggtgggatgtgtgtgggctgaaattccgagctgcggttgtgcatgagaatacacccttcgtggtaccccatctccgggacgttctcggctctgtgcgttcagtccctcaggaaccgtggaccttaatttaccttgctaagttcagaccttctcttcctttcctttcctttcctctcctgcccattttcctgttcttctgtccttcaatacttctgtagcttcccattcatgttctcttctcccagcaggcctcattgtgtgcagaaactgtggtgggggctgtgctgtctcctccctgcctcctgcctcctgcggctgttggatttgggaatgaccttggtgagagtctcactgctccagggtctctttttggtccaaaggctagacctatagagttggatcactttttttctttccggtgaaataaatggtttttcaacttagggtatgtgtgctttgcgagacttcttgcttgggcttgtt

SEQ ID NO: 360 - DNA, 2510 bp, Homo sapiens
agccttaatctggactgcagagagtataacgcagacaaggccatcgtggacaacctgcagggggactctggccgcggctactacctggagatgctgatcgggacccccccgcagaagctacagattctcgttgacactggaagcagtaactttgccgtggcaggaaccccgcactcctacatagacacgtactttgacacagagaggtctagcacataccgctccaagggctttgacgtcacagtgaagtacacacaaggaagctggacgggcttcgttggggaagacctcgtcaccatccccaaaggcttcaatacttcttttcttgtcaacattgccactatttttgaatcagagaatttctttttgcctgggattaaatggaatggaatacttggcctagcttatgccacacttgccaagccatcaagttctctggagaccttcttcgactccctggtgacacaagcaaacatccccaacgttttctccatgcagatgtgtggagccggcttgcccgttgctggatctgggaccaacggaggtagtcttgtcttgggtggaattgaaccaagtttgtataaaggagacatctggtatacccctattaaggaagagtggtactaccagatagaaattctgaaattggaaattggaggccaaagccttaatctggactgcagagagtataacgcagacaaggccatcgtggacagtggcaccacgctgctgcgcctgccccagaaggtgtttgatgcggtggtggaagctgtggcccgcgcatctctgattccagaattctctgatggtttctggactgggtcccagctggcgtgctggacgaattcggaaacaccttggtcttacttccctaaaatctccatctacctgagagacgagaactccagcaggtcattccgtatcacaatcctgcctcagctttacattcagcccatgatgggggccggcctgaattatgaatgttaccgattcggcatttccccatccacaaatgcgctggtgatcggtgccacggtgatggagggcttctacgtcatcttcgacagagcccagaagagggtgggcttcgcagcgagcccctgtgcagaaattgcaggtgctgcagtgtctgaaatttccgggcctttctcaacagaggatgtagccagcaactgtgtccccgctcagtctttgagcgagcccattttgtggattgtgtcctatgcgctcatgagcgtctgtggagccatcctccttgtcttaatcgtcctgctgctgctgccgttccggtgtcagcgtcgcccccgtgaccctgaggtcgtcaatgatgagtcctctctggtcagacatcgctggaaatgaatagccaggcctgacctcaagcaaccatgaactcagctattaagaaaatcacatttccagggcagcagccgggatcgatggtggcgctttctcctgtgcccacccgtcttcaatctctgttctgctcccagatgccttctagattcactgtcttttgattcttgattttcaagctttcaaatcctccctacttccaagaaaaataattaaaaaaaaaacttcattctaaaccaaaacagagtggattgggctgcaggctctatggggtttgttatgccaaagtgtctacatgtgccaccaacataaaacaaaaccaagccttggctcgttctcttctctcttcaatctctggaaaaataagtacatatagttgataacccctcttagcttacaggaagctttttgtattaattgcctttgaggttattttccgccagacctcaacctgggtcaaagtggtacaggaaggcttgcagtatgatggcaggagaatcagcctggggcctggggatgtaaccaagctgtacccttgagacctggaaccagagccacaggccccttttgtgggtttctctgtgctctgaatgggagccagaattcactaggaggtcatcaaccgatggtcctcacaagcctcttctgaagatggaaggccttttgcccgttgaggtagaggggaaggaaatctcctcttttgtacccaatacttatgttgtattgttggtgcgaaagtaaaaacactacctcttttgagactttgcccagggtcctgtgcctggatgggggtgcaggcagccttgaccacggctgttcccctcacccaaaagaattatcatcccaacagccaagacccaacaggtgctgaactgtgcatcaaccaggaagagttctatccccaagctggccactatcacatatgcttactcttgcttaaaattaataaatcatgttttgatgagaaaaaactattctatttcactagcttagttgtctctttttccaaatcttctctggaagtaggttggctattaccctgttgggaaacagggaaatggcctgatgcccctatttctgaccagctgtcagggaaggaagatgccagatgtgcagaagacacaaggtaacgtctacttattcccgtgcttcga

SEQ ID NO: 361 - DNA, 1697 bp, Homo sapiens
  modified_base (102)..(118): a, t, c, g, other or unknown
  modified_base (542): a, t, c, g, other or unknown
actgcaacttaatatttctatttagaacacagaaaatgaaaatatttagaataagttgtacatttgatgacaaataaatcactattaaaacaatttaatacnnnnnnnnnnnnnnnnnggtttgtttccagaagaacttttgatgtcagtaaatcttcacaatcccacctgtacattttaacattcatggacttgtaatggtgatgctttggctaacagcctagtagatgtattttatttcaattttatgatactacagtttcaaagtaattattcagaactctgaatataaaatagccctaaaccttaaaggacaaatcaaatttgaaataagaatttaaatctttggacaagctgttagggcttagtgactcctcttctactttgagcttttaaaatactgactattcataatgaaggaaaatagcaaccaactcttttagacacaataaacatggttagaagttctggcctatgacttgaaacaaataaccctgagcatacatttttgaaaaacattgtcagattcattgctgtaagtntgaagagttaataatctggaagggaattatggaattaagctgaacccatgcctgcatatttaaaaaacaaagcggcttattttaatagtatcaaactcttcagtatggtattgaatagtcagtcatatattctagctaggcatatgagtttcttatgataaaagctgaacttgttctctcaagtttaagtgaaaaaaattagttgagaaaaaataattatttaaaatataagccttcatattattgtacaatatttctcctttgagaagataggatatatgattttcccaaaaatcacaactttgaaggaagacttagttgctgacttcaattatatcctggaactggcaacttgtgcccttcctttgcttcaaaaaaagtgtaagaaagagtgataagatcaactttaatcattcttggatcttcagcaaattcaggatcaatgtagaaaaacactggcatatctacttcctcttggggattaagcctttgttcttcaaaacagaagcactggaaattatagaaagattttaataacatttctattctcgtattacataacagaaactatacagttcttttatcttagcattccagtacacttcgtgattttaataagcatactattaaatacacagttctgtgataaattaagagcatcttttcatctcaatgagttctgctttaaggatgaagaacaaattctaatcttaaaagcagatatccatttggtttggttctcaatctctgcatagcaggtatagatagtgaagaaaaatagcttgatgtttagaagaaattcgttttcagaaatcacaagatctactaaaacactaagtttcatactaaaccgtttcatgtatctttatcatattctgtaaagtttacactttgatgtacctgtattttattgaaatactgtccagcttcaaatggaacaatattgtatgtagaaattccaattactggtttgtcagtaggattcttagctctgtaaaacgccagtgcagtctctcctggcaccacatatatttctgtttgctgaggtctaaagttccactggagacttgcatgcacatctgcattaaagctaattttaatgattcgatctttaacaggcaccatgttttcaatcttgtctgaggcatgacctgc

SEQ ID NO: 362 - DNA, 1466 bp, Homo sapiens
gaggaggactaggaggaggaggacggcgacgaccagaaggggcccaagagagggggcgagcgaccgagcgccgcgacgcggaagtgaggtgcgtgcgggctgcagcgcagaccccggcccggcccctccgagagcgtcctgggcgctccctcacgccttggccttcaagccttctgcctttccaccctcgtgagcggagaactgggagtggccattcgacgacagtgtggtgtaaaggaattcattagccatggatgtattcatgaaaggactttcaaaggccaaggagggagttgtggctgctgctgagaaaaccaaacagggtgtggcagaagcagcaggaaagacaaaagagggtgttctctatgtaggctccaaaaccaaggagggagtggtgcatggtgtggcaacagtggctgagaagaccaaagagcaagtgacaaatgttggaggagcagtggtgacgggtgtgacagcagtagcccagaagacagtggagggagcagggagcattgcagcagccactggctttgtcaaaaaggaccagttgggcaagaatgaagaaggagccccacaggaaggaattctggaagatatgcctgtggatcctgacaatgaggcttatgaaatgccttctgaggaagggtatcaagactacgaacctgaagcctaagaaatatctttgctcccagtttcttgagatctgctgacagatgttccatcctgtacaagtgctcagttccaatgtgcccagtcatgacatttctcaaagtttttacagtgtatctcgaagtcttccatcagcagtgattgaagtatctgtacctgcccccactcagcatttcggtgcttccctttcactgaagtgaatacatggtagcagggtctttgtgtgctgtggattttgtggcttcaatctacgatgttaaaacaaattaaaaacacctaagtgactaccacttatttctaaatcctcactatttttttgttgctgttgttcagaagttgttagtgatttgctatcatatattataagatttttaggtgtcttttaatgatactgtctaagaataatgacgtattgtgaaatttgttaatatatataatacttaaaaatatgtgagcatgaaactatgcacctataaatactaaatatgaaattttaccattttgcgatgtgttttattcacttgtgtttgtatataaatggtgagaattaaaataaaacgttatctcattgcaaaaatattttatttttatcccatctcactttaataataaaaatcatgcttataagcaacatgaattaagaactgacacaaaggacaaaaatataaagttattaatagccatttgaagaaggaggaattttagaagaggtagagaaaatggaacattaaccctacactcggaattccctgaagcaacactgccagaagtgtgttttggtatgcactggttcctta

SEQ ID NO: 363 - DNA, 699 bp, Homo sapiens
cgcaaacagcacatccggtgtggtcgacgggtcctccaagagtttggggcgcggaccggagtaccttgcgtgcagttatgtcggcgtcggtagtgtctgtcatttcgcggttcttagaagagtacttgagctccactccgcagcgtctgaagttgctggacgcgtacctgctgtatatactgctgaccggggcgctgcagttcggttactgtctcctcgtggggaccttccccttcaactcttttctctcgggcttcatctcttgtgtggggagtttcatcctagcggtttgcctgagaatacagatcaacccacagaacaaagcggatttccaaggcatctccccagagcgagcctttgctgattttctctttgccagcaccatcctgcaccttgttgtcatgaactttgttggctgaatcattctcatttacttaattgaggagtaggagactaaaagaatgttcactctttgaatttcctggataagagttctggagatggcagcttattggacacatggattttcttcagatttgcacttactgctagctctgctttttatgcaggagaaaagcccagagttcactgtgtgtcagaacaactttctaacaaacatttattaatccagcctctgcctttcattaaatgtaaccttttgccttccaaattaaagaactccatgccactcctcaaaaa

SEQ ID NO: 364 - DNA, 2875 bp, Homo sapiens
catatctctctcccattccatagggaatgagctgggctgtcctttctccccacgttcacctgcacttcgttagagagcagtgttcacatgccacaccacaagatccccacaatgacataactccattcagagactggcgtgactgggctgggtctccccaccccccccttcagctcttgtatcactcagaatctggcagccagttccgtcctgacagagttcacagcatatattggtggattcttgtccatagtgcatctgctttaagaattaacgaaagcagtgtcaagacagtaaggattcaaaccatttgccaaaaatgagtctaagtgcatttactctcttcctggcattgattggtggtaccagtggccagtactatgattatgattttcccctatcaatttatgggcaatcatcaccaaactgtgcaccagaatgtaactgccctgaaagctacccaagtgccatgtactgtgatgagctgaaattgaaaagtgtaccaatggtgcctcctggaatcaagtatctttaccttaggaataaccagattgaccatattgatgaaaaggcctttgagaatgtaactgatctgcagtggctcattctagatcacaaccttctagaaaactccaagataaaagggagagttttctctaaattgaaacaactgaagaagctgcatataaaccacaacaacctgacagagtctgtgggcccacttcccaaatctctggaggatctgcagcttactcataacaagatcacaaagctgggctcttttgaaggattggtaaacctgaccttcatccatctccagcacaatcggctgaaagaggatgctgtttcagctgcttttaaaggtcttaaatcactcgaataccttgacttgagcttcaatcagatagccagactgccttctggtctccctgtctctcttctaactctctacttagacaacaataagatcagcaacatccctgatgagtatttcaagcgttttaatgcattgcagtatctgcgtttatctcacaacgaactggctgatagtggaatacctggaaattctttcaatgtgtcatccctggttgagctggatctgtcctataacaagcttaaaaacataccaactgtcaatgaaaaccttgaaaactattacctggaggtcaatcaacttgagaagtttgacataaagagcttctgcaagatcctggggccattatcctactccaagatcaagcatttgcgtttggatggcaatcgcatctcagaaaccagtcttccaccggatatgtatgaatgtctacgtgttgctaacgaagtcactcttaattaatatctgtatcctggaacaatattttatggttatgtttttctgtgtgtcagttttcatagtatccatattttattactgtttattacttccatgaattttaaaatctgagggaaatgttttgtaaacatttattttttttaaagaaaagatgaaaggcaggcctatttcatcacaagaacacacacatatacacgaatagacatcaaactcaatgctttatttgtaaatttagtgtttttttatttctactgtcaaatgatgtgcaaaaccttttactggttgcatggaaatcagccaagttttataatccttaaatcttaatgttcctcaaagcttggattaaatacatatggatgttactctcttgcaccaaattatcttgatacattcaaatttgtctggttaaaaaataggtggtagatattgaggccaagaatattgcaaaatacatgaagcttcatgcacttaaagaagtatttttagaataagaatttgcatacttacctagtgaaacttttctagaattatttttcactctaagtcatgtatgtttctctttgattatttgcatgttatgtttaataagctactagcaaaataaaacatagcaaatggcatcactgtgtttgacttcttgtgaaatttctgtactttgtatataaaatacataaaacaatagattagaaatcaaaagatatctctggcctgcaatattttactgatgtgaacataggattttccactaaataatttgtctacttctagcattcacttacaaagagttcttaaaaacacctataataggtacttagatttcacaacttacttagatatttgtcattattcccattcctggtgtttttactggttcatatacaatggtattctattagataagaagctgctatgtgatctcagcactcactccttggttgtcaagaaatggtggataactcacaggattaaaaatgaatgaatataaaattttctgaaatagatatttaaaaaatcattttagcttgaagccaatatgtctggatcataggttttgagttcataatccagtaataacagctttcagctttctatgagtatatacaattctatacaatgataaatactctgcatataatttataaaaataacttctgttttacctagttaacaataaaacctatgtgtggagccaaatgttatgcagacaaaggtctgctcatcccataccagtgtatatatagtcaaatatgtgtctagtacaaataaaatgtatctctaaggcataaaatgttttaacacaccacttttagtgaactctatcttatggtacagcggcctttcatcaaaggatcatcattgagactgagttgactggcagatatgtgcgatggatattacattaggtacaatgtgtatttttgattttcatgagttttctacattaaggtaaattccttagagtgtgatagcagcctcagtttatttgttggtttaaacttgaaatctactttttctcgataaaactataatgtagatgaattg

SEQ ID NO: 365 - DNA, 2334 bp, Homo sapiens
gcgagcggcgggcagcgcagactgcgaggctcttttgttcggctgaggggagggccgttggccgggggactgcggtacgccgcttcagtgagggacgccactgcggccacccggcttgctgccttcctgggcgccactcccccaggcgacccgacgcgacgcgccagtagcgcagcaccgattcctctcggggctcttgggcgctgctctgagcagcgtcaccctttacaccagaaagctggcgggcactatggggaaaaaacaaaacaagaagaaagtggaggaggtgctagaagaggaggaagaggaatatgtggtggaaaaagttctcgaccgtcgagtggtaaagggcaaagtggagtacctcctaaagtggaagggattctcagatgaggacaacacatgggagccagaagagaacctggattgccccgacctcattgctgagtttctgcagtcacagaaaacagcacatgagacagataaatcagagggaggcaagcgcaaagctgattctgattctgaagataagggagaggagagcaaaccaaagaagaagaaagaagagtcagaaaagccacgaggctttgctcgaggtttggagccggagcggattattggagctacagactccagtggagagctcatgttcctgatgaaatggaaaaactctgatgaggctgacctggtccctgccaaggaagccaatgtcaagtgcccacaggttgtcatatccttctatgaggaaaggctgacgtggcattcctacccctcggaggatgatgacaaaaaagatgacaagaactaacgctcctgagtaccagcccctgtcacatctgactgtgggtttcaagtgggaagggaaggagttctacttgtcttgacaccatagaggtggcttgagaagatgtcctttgaagagccagtatagtttctgtgccctgcagcagcccaagtgctttaaagccgtttcaagctgtatagtttgcacacccatcccagtggaggggaaaggggataagtgtttcaaggcaaccttttctgcactttgctgcgaaaagcaaagggccttctatgaaggacaaaacttgcagaattgggtgtgtgggagagcaaaaaaatactgtagatcttcaaagagcatctccacaacccacagccttcttcccaatagtgttaactctgcatttttacagcgtagcatgtgtgtagtttttggctattactggtgtattatttgggggagggagggatggggaggggagaaagggagatgggtagcatcattttgattaacatttggggcctgataggggaaatggtgaagcaatggaaaagaacagacaactaatgatttgcttctatgtccagaatattttacctttaaaaaaatgtcattggcaccataaataaggactgtgagagactgtttaaaagctgtgaaagtctgaaacctataagccaaggtgttccctgcctaaacttattgctgttcccacaaaggactaagcctgttcataagttaccaaagttgccattttggagatggaaattgacgaggagggaaggtcttttattggagagtatacagtacaagcagatcattctgccttagaggtgctaattcccgaaattagaagaccctttcttttccagtaacgaagttataaatatcagcttgttcatccaagccactggctgaggtgttaggaagaggaagagggtggtagaggaggtaagacagtagggaaagacaagggcccatgctcttagtggggaaaactcttggagccgtttactttgagctttgaacactgaaaccattgttggcagggttcagtcactgacagcacaagtttcactgaattgatccaagagtttagtgatttcaaaagccttggtctcaggagaagattaaactttcatattgggcagtggttcactttaaaacacacacatacacacacaaaacaattttttaagaaatcctaataagtaacatacccaaaatgctctgtcttgagtcatgagaaccatcagttcttgatattgtctagacttgcatctagagctacgttgtaaaattcttttaggcatgtgttagatttctgtgtaaactttgtttaaatgtaaacttcatactacattgtcagtttttgtcttaataaaactatagatttataatccctgatttctgtcttaagtcttaccaggaacccttcttgccttataggttcagcctgttggaaatggcttcctcacttgaatggttttatttcttgaacactgtaggcttgaaaatctagtgcctggcctgaatctttaagtggtcac

SEQ ID NO: 366 - DNA, 2930 bp, Homo sapiens
gccagctgtgccggcgtttgttggctgccctgcgcccggccctccagccagccttctgccggccccgccgcgatggaggtgccccagccggagcccgcgccaggctcggctctcagtccagcaggcgtgtgcggtggcgcccagcgtccgggccacctcccgggcctcctgctgggatctcatggcctcctggggtccccggtgcgggcggccgcttcctcgccggtcaccaccctcacccagaccatgcacgacctcgccgggctcggcagccgcagccgcctgacgcacctatccctgtctcgacgggcatccgaatcctccctgtcgtctgaatcctccgaatcttctgatgcaggtctctgcatggattcccccagccctatggacccccacatggcggagcagacgtttgaacaggccatccaggcagccagccggatcattcgaaacgagcagtttgccatcagacgcttccagtctatgccggtgaggctgctgggccacagccccgtgcttcggaacatcaccaactcccaggcgcccgacggccggaggaagagcgaggcgggcagtggagctgccagcagctctggggaagacaaggagaatgatggatttgtcttcaagatgccatggaagcccacacatcccagctccacccatgctctggcagagtgggccagccgcagggaagcctttgcccagagacccagctcggcccccgacctgatgtgtctcagtcctgaccggaagatggaagtggaggagctcagccccctggccctaggtcgcttctctctgacccctgcagagggggatactgaggaagatgatggatttgtggacatcctagagagtgacttaaaggatgatgatgcagttcccccaggcatggagagtctcattagtgccccactggtcaagaccttggaaaaggaagaggaaaaggacctcgtcatgtacagcaagtgccagcggctcttccgctctccgtccatgccctgcagcgtgatccggcccatcctcaagaggctggagcggccccaggacagggacacgcccgtgcagaataagcggaggcggagcgtgacccctcctgaggagcagcaggaggctgaggaacctaaagcccgcgtcctccgctcaaaatcactgtgtcacgatgagatcgagaacctcctggacagtgaccaccgagagctgattggagattactctaaggccttcctcctacagacagtagacggaaagcaccaagacctcaagtacatctcaccagaaacgatggtggccctattgacgggcaagttcagcaacatcgtggataagtttgtgattgtagactgcagatacccctatgaatatgaaggcgggcacatcaagactgcggtgaacttgcccctggaacgcgacgccgagagcttcctactgaagagccccatcgcgccctgtagcctggacaagagagtcatcctcattttccactgtgaattctcatctgagcgtgggccccgcatgtgccgtttcatcagggaacgagaccgtgctgtcaacgactaccccagcctctactaccctgagatgtatatcctgaaaggcggctacaaggagttcttccctcagcacccgaacttctgtgaaccccaggactaccggcccatgaaccacgaggccttcaaggatgagctaaagaccttccgcctcaagactcgcagctgggctggggagcggagccggcgggagctctgtagccggctgcaggaccagtgaggggcctgcgccagtcctgctacctcccttgcctttcgaggcctgaagccagctgccctatgggcctgccgggctgagggcctgctggaggcctcaggtgctgtccatgggaaagatggtgtgggtgtcctgcctgtctgccccagcccagattcccctgtgtcatcccatcattttccatatcctggtgccccccacccctggaagagcccagtctgttgagttagttaagttgggttaataccagcttaaaggcagtattttgtgtcctccaggagcttcttgtttccttgttagggttaacccttcatcttcctgtgtcctgaaacgctcctttgtgtgtgtgtcagctgaggctgggggagagccgtggtccctgaggatgggtcagagctaaactccttcctggcctgagagtcagctctctgccctgtgtacttcccgggccagggctgcccctaatctctgtaggaaccgtggtatgtctgccatgttgcccctttctcttttcccctttcctgtcccaccatacgagcacctccagcctgaacagaagctcttactctttcctatttcagtgttacctgtgtgcttggtctgtttgactttacgcccatctcaggacacttccgtagactgtttaggttcccctgtcaaatatcagttacccactcggtcccagttttgttgccccagaaagggatgttattatccttgggggctcccagggcaagggttaaggcctgaatcatgagcctgctggaagcccagcccctactgctgtgaaccctggggcctgactgctcagaacttgctgctgtcttgttgcggatgggatggaaggttggatggatgggtggatggccgtggatggccgtggatgcgcagtgccttgcatacccaaaccaggtgggagcgttttgttgagcatgacagcctgcagcaggaatatatgtgtgcctatttgtgtggacaaaaatatttacacttagggtttggagctattcaagaggaaatgtcacagaagcagctaaaccaaggactgagcaccctctggattctgaatctcaagatgggggcagggctgtgcttgaaggccctgctgagtcatctgttagggccttggttcaataaagcactgagcaagttgagaaacc

SEQ ID NO: 367 - DNA, 1865 bp, Homo sapiens
gcgggccctgcgcgccctgcgctcgccatggcggtttgggcggcgacgtgagcggctccgcggaccccgagcggggccccggccgcgacctgagccgccgccgagcgcccggggccatgcgaccgacgctgctgtggtcgctgctgctgctgctcggagtcttcgccgccgccgccgcggccccgccagaccctctttcccagctgcccgctcctcagcacccgaagattcgcctgtacaacgcagagcaggtcctgagttgggagccagtggccctgagcaatagcacgaggcctgttgtctaccaagtgcagtttaaatacaccgacagtaaatggttcacggccgacatcatgtccataggggtgaattgtacacagatcacagcaacagagtgtgacttcactgccgccagtccctcagcaggcttcccaatggatttcaatgtcactctacgccttcgagctgagctgggagcactccattctgcctgggtgacaatgccttggtttcaacactatcggaatgtgactgtcgggcctccagaaaacattgaggtgaccccaggagaaggctccctcatcatcaggttctcctctccctttgacatcgctgatacctccacggcctttttttgttattatgtccattactgggaaaaaggaggaatccaacaggtcaaaggccctttcagaagcaactccatttcattggataacttaaaaccctccagagtgtactgtttacaagtccaggcacaactgctttggaacaaaagtaacatctttagagtcgggcatttaagcaacatatcttgctacgaaacaatggcagatgcctccactgagcttcagcaagtcatcctgatctccgtgggaacattttcgttgctgtcggtgctggcaggagcctgtttcttcctggtcctgaaatatagaggcctgattaaatactggtttcacactccaccaagcatcccattacagatagaagagtatttaaaagacccaactcagcccatcttagaggccttggacaaggacagctcaccaaaggatgacgtctgggactctgtgtccattatctcgtttccggaaaaggagcaagaagatgttctccaaacgctttgaaccaaagcatgggcctagcccactggctccctggaagagatcaagccatcggagctgctagagttctgtctggactttccagagaccagtattcccttttgctgcctctaaaaggcctgtccctgcagacatgagagacagcaggtctcatgggggtgacaagctttttttttttttcttaaagaattttcaaaatcaaattccagaatgattttacggagatatcccaggaaaattaaggcttctcttaaacactaaaaaggcatgtaattgcttgttagcaaaatggatatgacacatctctgatacttttttcattattggttgggctgagcagtcagaagacctggtcgtcgtcttgactttggcaaatgagccggagccccttgggcaggtcacacaacctgtcccagcgagggacactgagtggcccttcatgtacatccatggtgtgctggcttaaaatgtaattaatcttgtaaatatactcctagtaatttaagattttgtttttaaactggaaataaaagattgtatagtgcatgttttttaaagtctatgtgaagtgttttctttattgtagcctattttctgcagagtttcagctttctaaaattactcaatctaaacttgttttttcttaaataacacctgctagagctactgaggcctcatgggaactcagcaaacacttcctatggatgtcacttgatcctcccaaagtgctgggattac

SEQ ID NO: 368 - DNA, 2651 bp, Homo sapiens
taggaaacagaaattttccctggctattttctacccacagctgtcatgatcaacagatgttagccctttctgagcagaaaagaatcaaacactggaagatggcatctaaactcatcctgcctgagtccctggtgagctgttatttctggctttttacaggtgacttgactgtggccttgcctctgcttgtccctattgcctaggactcatagtgtccagcaggtgctttgaggcattttagccccagttattctctaggcaactaggcttggcacagtgggaactgggcacctcccaggtgatttactgatcctctttgctccttcctttctctgccttctcacttttttcccctaaatcttgtactgttcacatcttcagcacctggcctaccatgtaattcagaaatgggtggtaggacagcttctgaagtggcaagtactaaactatagcccattctcttctttagagtttgttgacatttgaagatgtggctgtgtatttttctgaggaagagtggcaattattgaatcctcttgagaagactctctacaatgatgtaatgcaggatatctatgagactgtcatctctctagggttaaagctaaaaaatgacactggaaatgatcatcctatatctgtttctacatcagaaatacaaacatcaggatgcgaagtatcaaaaaagaccagaatgaaaattgcccagaaaacaatgggcagggaaaatcctggtgatacacacagtgtacagaaatggcatcgagcttttccaaggaagaaaagaaagaaacctgcaacttgtaaacaagagcttccaaaacttatggatcttcatgggaaaggccccacaggggagaaaccttttaagtgtcaggaatgtgggaaaagcttcagagttagctctgatcttattaaacaccacagaattcacactggagagaaaccctataaatgtcaacaatgtgacaggaggtttagatggagttcagatcttaataagcacttcatgacccatcaaggaataaaaccatatagatgctcatggtgtgggaaaagctttagtcataacacaaatctacacacacaccaaagaattcacacaggagagaagccctttaaatgtgatgaatgtggaaaaagattcattcagaactcccaccttattaaacaccagagaactcacacaggtgagcagccttatacatgtagcttatgcaagagaaactttagtaggcgatcgagccttcttagacaccagaaactccacagaagaagggaagcatgtctagtgtctccaaactgaggaaagttaccatgtagagcttgactttagaagtggtgaaagaatacaaaattatgaggcacccaatgataggaatctgtgattaataaaacatttgggaagggtacatgttacacttcacaaaaaggaatctaagctgtctgttttattcagcattgcatcttctgtgcctagcacaagagttgatacataaggagtactttataaataaaaaaatgaaagtgtagtgatgagattcctttagctatctatctatatgtatatatctggttattcaaagcttccccacccccagtcatctaaatttttcaggtatcaagtgctcaacagacatatgatagtcaaggctcttagtctcattttttactctttgtcaagagaaatggaaaataagagtacttgggccctcttaagggagctcagagagaattactaaattagggacagtttcaatagttatcattctatctacatgaacaatcaagaccaggactcagggaactttactctgtaacagaaagagaggattcagtgtttgccctgggagaattgtcccattcttgttgcttctctcctgagtacccactaccacaatgtcttctgtcaaggaattacaagtagcaagggaaggtctgaatgtaaggacaggcctagggaccttgcaagcacttgatatctctcctcttgctgactttgtcaacatagacatatagtgaaatgatgagggaggcagtcttggccctcatccaggtatctggtttttttttgtagaaagcacagataagtggtaaatggtctttttctgactttcattatgtggactggatggaggctttcaaactggtgccatactgctgcaggacctaaagggagccccatctttatggctgatcaactacaaccctatatgcctgaatactctgcaagaaggcctggagattttgcaaaactgatttattgagaatggcaaggagagccttgtgaacttttagctttggtgcacagctgataccaggagggaacatcctgaagtgtcagagaaaagtaaggcatatggctcacagtgatgatgccagtcagagccaggccagatggaaattgttttctgatgttactggttttcttttccctattagccaaagtgactatctcttaagagaagataatgtgacgtcaagggaagttggaaggcatggatttatatctatgtcagatcctggtttataatgttggccaaggcttatttatatatgtttatttagtattccataaaattgtacttcgtaatgaaaatgacacattttatcttaaatttagacaataaacaaaactttgttaccaaatc

SEQ ID NO: 369 - DNA, 2717 bp, Homo sapiens
ggcggctgcgtactggctgtgggatgggaagtgaagccccagcgagcggctgcagcggggccgtgaggagcagccagcgggaggcggcggcgagtcggtgagcagctgggaagagcagaaccggggcggagcacctgcaggcgcgggcggcggccccaccatggcgattcgcaagaaaagcaccaagagccccccagtgctgagccacgaattcgtcctgcagaatcacgcggacatcgtctcctgtgtggcgatggtcttcctgctggggctcatgtttgagataacggcaaaagcttctatcatttttgttactcttcagtacaatgtcaccctcccagcaacagaagaacaagctactgaatcagtgtccctttattactatggcatcaaagatttggctactgttttcttctacatgctagtggcgataattattcatgccgtaattcaagagtatatgttggataaaattaacaggcgaatgcacttctccaaaacaaaacacagcaagtttaatgaatctggtcagcttagtgcgttctacctttttgcctgtgtttggggcacattcattctcatctctgaaaactacatctcagacccaactatcttatggagggcttatccccataacctgatgacatttcaaatgaagtttttctacatatcacagctggcttactggcttcatgcttttcctgaactctacttccagaaaaccaaaaaagaagatattcctcgtcagcttgtctacattggtctttacctcttccacattgctggagcttaccttttgaacttgaatcatctaggacttgttcttctggtgctacattattttgttgaatttcttttccacatttcccgcctgttttattttagcaatgaaaagtatcagaaaggattttctctgtgggcagttctttttgttttgggaagacttctgactttaattctttcagtaactaaaggcagatcttctaaaaaaggaacagaaaatggtgtgaatggaacattaacttcaaatgtagcagactctccccggaataaaaaagagaaatcttcataatgaattataaactaattgattaatgtccccaaagaaatctgctttctactatatctttcagcattagagatttttctgttcttgaaaatacagtctgtgctctttgatttttgctattgtacggtttcatgcatttttttaaagggcatttgaggggaggattattgctatgaatgaaaaaaatattttagcttagactaagctacctgccttcaaaatagtttagggaccaccaccatattttattttgtttttatttttgaacatttttctaatgatttggagagaaaactatttacaaaaattccacatatcagtgatacaatttcttgctgtcaccaattttttataatagcagagtggcctgttctaagaaggccatattttttaagttatctttcagggtaacatggaaatactataaagttggatgtcaaactttaatatgttttcagtgttctctaattttttggaatttttgtagactttacacctggaaaaaaagatttgtaaaatcaccggaacaattgtgtgctttattttataggtagtggttattagtattacatccccattttaaaaacaaaaacataataatggttacaacacgtggagttttactaacatacatattaaatcaaagtatattcttaaaagtacttgtgaagtaaaatctttcttgtgcattttcaatacttgtaaactggaaatcagaaaatatttactatgaacaggaaaatctgacatatagccctttttgatatgtttattaataatgattcttaatggggctcataataagtttaatatgcacagcatcttagaaaagtttaacctgcaaacacttttaaaacataatgcctacttgatttatatctataaaaagactgacaggtaattatatttggaaaacatttaatgcactaactttaaagaaattgaaaattcaggtggataaatagtcttacaaaagacaatgtgctttatgttatacctatagctttggtcccatctttaattgagaaacatttatctgtataaaacatatttttggataaatatatatatatatatttgtattgctacagaaaggctctaaaaagcatttgaggaaaatatttggttcccttttctataatcatcctttaagattcttatagctacatttggtttattcatcatatttacagtatatatattgttcttttcagtgttcacatcttgttccccatttctcacttgtgtcaccagctgtttgtgccatttttagtgtaaaagttgcagacctattagatctgcagtttaagttgccatgctgctaggaaattgtcctttttctttctagctgttaacctacttcctggaaaaagtagtagctctctgtagcattatggagtttcagtggaaccaaatttttgccattaaaaactggcattatactgaactatacattgagaaatcaatcaaaataaaaatttttactttcacaagttgtatcctggatgtttctgtcattgttggtgattaggctattttggtatataacctcattaaaatgtaccatatttaaaacacttcatagacattcagaataacccttttcaaaattgtgttctgcaaataaacagatttgttccacagaaaa

SEQ ID NO: 370 - DNA, 4105 bp, Homo sapiens
gaattcgcggccgcctcttgcggtcccagagtggagtggaaggtctggagctttgggaggagacggggaggacagactggaggcgtgttcctccggagttttctttttcgtgcgagccctcgcgcgcgcgtacagtcatcccgctggtctgacgattgtggagaggcggtggagaggcttcatccatcccacccggtcgtcgccggggattggggtcccagcgacacctccccgggagaagcagtgcccaggaagttttctgaagccggggaagctgtgcagccgaagccgccgccgcgccggagcccgggacaccggccaccctccgcgccacccaccctcgctttctccggcttcctctggcccaggcgccgcgcggacccggcagctgtctgcgcacgccgagctccacggtgaaaaaaaaagtgaaggtgtaaaagcagcacaagtgcaataagagatatttcctcaaatttgcctcaagatggaaaccctttgcctcagggcatccttttggctggcactggttggatgtgtaatcagtgataatcctgagagatacagcacaaatctaagcaatcatgtggatgatttcaccacttttcgtggcacagagctcagcttcctggttaccactcatcaacccactaatttggtcctacccagcaatggctcaatgcacaactattgcccacagcagactaaaattacttcagctttcaaatacattaacactgtgatatcttgtactattttcatcgtgggaatggtggggaatgcaactctgctcaggatcatttaccagaacaaatgtatgaggaatggccccaacgcgctgatagccagtcttgcccttggagaccttatctatgtggtcattgatctccctatcaatgtatttaagctgctggctgggcgctggccttttgatcacaatgactttggcgtatttctttgcaagctgttcccctttttgcagaagtcctcggtggggatcaccgtcctcaacctctgcgctcttagtgttgacaggtacagagcagttgcctcctggagtcgtgttcagggaattgggattcctttggtaactgccattgaaattgtctccatctggatcctgtcctttatcctggccattcctgaagcgattggcttcgtcatggtaccctttgaatataggggtgaacagcataaaacctgtatgctcaatgccacatcaaaattcatggagttctaccaagatgtaaaggactggtggctcttcgggttctatttctgtatgcccttggtgtgcactgcgatcttctacaccctcatgacttgtgagatgttgaacagaaggaatggcagcttgagaattgccctcagtgaacatcttaagcagcgtcgagaagtggcaaaaacagttttctgcttggttgtaatttttgctctttgctggttccctcttcacttaagccgtatattgaagaaaactgtgtataacgaaatggacaagaaccgatgtgaattacttagtttcttactgctcatggattacatcggtattaacttggcaaccatgaattcatgtataaaccccatagctctgtattttgtgagcaagaaatttaaaaattgtttccagtcatgcctctgctgctgctgttaccagtccaaaagtctgatgacctcggtccccatgaacggaacaagcatccagtggaagaaccacgatcaaaacaaccacaacacagaccggagcagccataaggacagcatgaactgaccacccttagaagcactcctcggtactcccataatcctctcggagaaaaaaatcacaaggcaactgtgactccgggaatctcttctctgatccttcttccttaattcactcccacacccaagaagaaatgctttccaaaaccgcaaggtagactggtttatccacccacaacatctacgaatcgtacttctttaattgatctaatttacatattctgcgtgttgtattcagcactaaaaaatggtgggagctgggggagaatgaagactgttaaatgaaaccagaaggatatttactacttttgcatgaaaatagagctttcaagtacatggctagcttttatggcagttctggtgaatgttcaatgggaactggtcaccatgaaactttagagattaacgacaagattttctactttttttaagtgattttttgtccttcagccaaacacaatatgggctcaggtcacttttatttgaaatgtcatttggtgccagtattttttaactgcataatagcctaacatgattatttgaacttatttacacatagtttgaaaaaaaaaagacaaaaatagtattcaggtgagcaattagattagtattttccacgtcactatttatttttttaaaacacaaattctaaagctacaacaaatactacaggcccttaaagcacagtctgatgacacatttggcagtttaatagatgttactcaaagaattttttaagaactgtattttattttttaaatggtgttttattacaagggaccttgaacatgttttgtatgttaaattcaaaagtaatgcttcaatcagatagttctttttcacaagttcaatactgtttttcatgtaaattttgtatgaaaaatcaatgtcaagtaccaaaatgttaatgtatgtgtcatttaactctgcctgagactttcagtgcactgtatatagaagtctaaaacacacctaagagaaaaagatcgaatttttcagatgattcggaaattttcattcaggtatttgtaatagtgacatatatatgtatatacatatcacctcctattctcttaatttttgttaaaatgttaactggcagtaagtcttttttgatcattcccttttccatataggaaacataattttgaagtggccagatgagtttatcatgtcagtgaaaaataattacccacaaatgccaccagtaacttaacgattcttcacttcttggggttttcagtatgaacctaactccccaccccaacatctccctcccacattgtcaccatttcaaagggcccacagtgacttttgctgggcattttcccagatgtttacagactgtgagtacagcagaaaatcttttactagtgtgtgtgtgtatatatataaacaattgtaaatttcttttagcccatttttctagactgtctctgtggaatatatttgtgtgtgtgatatatgcatgtgtgtgatggtatgtatggatttaatctaatctaataattgtgccccgcagttgtgccaaagtgcatagtctgagctaaaatctaggtgattgttcatcatgacaacctgcctcagtccattttaacctgtagcaaccttctgcattcataaatcttgtaatcatgttaccattacaaatgggatataagaggcagcgtgaaagcagatgagctgtggactagcaatatagggttttgtttggttggttggtttgataaagcagtatttggggtcatattgtttcctgtgctggagcaaaagtcattacactttgaagtattatattgttcttatcctcaattcaatgtggtgatgaaattgccaggttgtctgatatttctttcagacttcgccagacagattgctgataataaattaggtaagataatttgttgggccatattttaggacaggtaaaataacatcaggttccagttgcttgaattgcaaggctaagaagtactgcccttttgtgtgttagcagtcaaatctattattccactggcgcatcatatgcagtgatatatgcctataatataagccataggttcacaccattttgtttagacaattgtctttttttcaagatgctttgtttctttcatatgaaaaaaatgcattttataaattcagaaagtcatagatttctgaaggcgtcaacgtgcattttatttatggactggtaagtaactgtggtttactagcaggaatatttccaatttctacctttactacatcttttcaacaagtaactttgtagaaatgagccagaagccaaggccctgagttggcagtggcccataagtgtaaaataaaagtttacagaaacctt

SEQ ID NO: 371 - DNA, 1504 bp, Homo sapiens
cggggccccacgctgcgcacccgcgggtttgctatggcgatgagcagcggcggcagtggtggcggcgtcccggagcaggaggattccgtgctgttccggcgcggcacaggccagagtgatgattctgacatttgggatgatacagcactgataaaagcatatgataaagctgtggcttcatttaagcatgctctaaagaatggtgacatttgtgaaacttcgggtaaaccaaaaaccacacctaaaagaaaacctgctaagaagaataaaagccaaaagaagaatactgcagcttccttacaacagtggaaagttggggacaaatgttctgccatttggtcagaagacggttgcatttacccagctaccattgcttcaattgattttaagagagaaacctgtgttgtggtttacactggatatggaaatagagaggagcaaaatctgtccgatctactttccccaatctgtgaagtagctaataatatagaacagaatgctcaagagaatgaaaatgaaagccaagtttcaacagatgaaagtgagaactccaggtctcctggaaataaatcagataacatcaagcccaaatctgctccatggaactcttttctccctccaccaccccccatgccagggccaagactgggaccaggaaagccaggtctaaaattcaatggcccaccaccgccaccgccaccaccaccaccccacttactatcatgctggctgcctccatttccttctggaccaccaataattcccccaccacctcccatatgtccagattctcttgatgatgctgatgctttgggaagtatgttaatttcatggtacatgagtggctatcatactggctattatatgggttttagacaaaatcaaaaagaaggaaggtgctcacattccttaaattaaggagaaatgctggcatagagcagcactaaatgacaccactaaagaaacgatcagacagatctggaatgtgaagcgttatagaagataactggcctcatttcttcaaaatatcaagtgttgggaaagaaaaaaggaagtggaatgggtaactcttcttgattaaaagttatgtaataaccaaatgcaatgtgaaatattttactggactctattttgaaaaaccatctgtaaaagactgaggtgggggtgggaggccagcacggtggtgaggcagttgagaaaatttgaatgtggattagattttgaatgatattggataattattggtaattttatgagctgtgagaagggtgttgtagtttataaaagactgtcttaatttgcatacttaagcatttaggaatgaagtgttagagtgtcttaaaatgtttcaaatggtttaacaaaatgtatgtgaggcgtatgtggcaaaatgttacagaatctaactggtggacatggctgttcattgtactgtttttttctatcttctatatgtttaaaagtatataataaaaatatttaatttttttttaaaaaaaaaaaa

SEQ ID NO: 372 - DNA, 4532 bp, Homo sapiens
  modified_base (675): a, t, c, g, other or unknown
  modified_base (3333): a, t, c, g, other or unknown
  modified_base (3376): a, t, c, g, other or unknown
tcagacatctagtgagtcgcagagccagggaactgaccacgggcattttcaccccattacccttccagcttattgccgactgctcccgaagggagcgaaaaggacaggcaaagggtttcaccaaaccctttgtaatgggagattcttgccttcttacctttcctcacgtttgcttctctgccagaatgtcttcccgcactttccccagaacccaagttctcctaatcatctttcaagatccctttccctcaaccacagatgagccgtgcctatttctccttcaaatgactccctatggcttctagttggtagtcttttatttaccacctcatagtccttttatttatatcccataaatgatcgtccggccccgcaccgtgggaccaggacgctgcctcgaccatggcggtctcctggaaacaggctgctttgagccgaaactggtgaccgtttcccaaccccgtccaggagtccgacgcctcttttctccaggccaacttcaagtgaggtgtatcaactctatccgcacaaatttcttgccacgagagcagaagattatgatctctgatgctgccttagggctgaagacactcccaactcggcgacgcttagcaatcatcgacttcctcctcctcttggctgcctcggagatcctgttccggggcagaggtctcnccgccccgcccctcgtctcctccaagatggcgagcggcggcagcgggggggtgtcagtacctgcgctgtggagtgaagtgaaccggtatggccagaacggcgacttcacgcgcgctctcaagaccgtcaataagatactacagatcaacaaagatgacgtaactgccctgcattgtaaagtggtatgccttatccagaatggaagtttcaaggaagctttgaatgtcatcaatactcacaccaaagtgttagccaataactctctctcctttgaaaaggcatattgcgagtacaggctgaacagaattgagaatgccttgaagacaatagaaagtgccaaccagcagacagacaaactgaaggagctttatggacaagtgttataccgtttggaacgctatgatgaatgcttagcagtgtatagagatctcgtccgaaactcccaagatgattatgatgaggagaggaaaacaaacctttcagcagttgttgcagctcaaagcaattgggaaaaagtggttccagagaacctggggcctccaagaaggcacacatgagctgtgctacaacactggcatgtgcactgataggccaaggccagctgaaccaggccatgaaaatcctacaaaaagctgaagatctttgccgccgttcattatcagaagacactgatgggactgaggaagacccacaggcagaactggccatcattcatggtcagatggcttatattctgcagcttcagggtcgaacagaggaggctttgcaactttacaatcaaataataaaactaaaaccaacagatgtgggattactagctgtaattgcaaataacatcattaccattaacaaggaccaaaatgtctttgactccaagaagaaagtgaaattaaccaatgcggaaggagtagagtttaagctttccaagaaacaactacaagctatagaatttaacaaagctttacttgctatgtacacaaaccaggctgaacaatgccgcaaaatatctgccagtttacagtcccaaagtcccgagcatctcttacctgtgttaatccaagctgcccagctctgccgtgaaaagcagcacacaaaagcaatagagctgcttcaggaattttcagatcagcatccagaaaatgcagctgaaattaagctgaccatggcacagttgaaaatttctcaaggtaatatttctaaagcatgtctaatattgagaagcatagaggagttaaagcataaaccaggcatggtatctgcattagttaccatgtatagccatgaagaagatattgatagtgccattgaggtcttcacacaagctatccagtggtatcaaaaccatcagccaaaatctcctgctcatttgtccttgataagagaagctgcaaacttcaaactcaaatatgggcggaagaaggaggcaattagtgacctacaacagctgtggaaacaaaatccaaaagatattcacaccctggcacagcttatttctgcttactcacttgtagatccagagaaagccaaagctcttagtaaacacttgccatcgtcagatagtatgtctctaaaagtagatgttgaggctcttgaaaattctgctggtgctacatacattcggaagaagggtggaaaagttactggagatagtcaaccaaaggaacaaggacagggagatttgaaaaagaagaaaaagaaaaagaagggaaaattgcctaagaattatgacccaaaagttaccccagatccagaaagatggctgccaatgcgagaacgttcttactaccggggaagaaagaagggtaaaaagaaggatcagattggaaaagggacccagggagcaactgcaggagcttcatctgaactggatgccagtaaaactgtgagcagcccacccacctccccaagacctggcagtgctgcaacagtatctgcctctacaagtaacatcatacccccaagacaccagaaacctgcaggggctccagcaacaaaaaagaaacagcaacagaaaaagaagaaaggtggaaaaggtggctggtgatgagaatattcttgttgcaggctgtttttaaactagtgtcagtgacactaggaatataataaaggtaacacagcaagaagcacagaactactccctcttcatctccatattttcataatttcttgtgtttcaaatagggaaacatcttcctcaaagtctgcctagtgagatacggcctactggttgcctcatagctttgtacagattatgaggactgaaaataattgggcatttacccatcttggtatctgttgtatcctttatctgtgtgtgctgatttgatcttttttcagtttcacataccttatctaaggtttcccaggatttaaacagaaactacttctatgatttcagctggagtctgaagatacttgtttctgttcaagtcccactttaaattatgtcttaggagactgaaagtggaatcttctgagcattcctaaatatctgcttagaaatatcatgtgataaagagggaccttcttaatacactgatgttcttcactaaatggatggccacaagaaaaataaagtaaatgtcttaaataatttaaccataaattttctgtcatgtgatactggaatatgggatacttttcatgtttatatatatntatatatgtatatatatatacgatatatatatatatataaacntgaaatatatatatatggctcctttgtgccccatgtcattttcagattatggtagcatgctgatacagcaccatgaaagaactcaaggaaaatatatcaatgtaagaagttcactcttagacccagtgttctgaggtcacatgggtttggactgtctcaatcagaaagattaatgactgttatcaagaacatgaacattggcttcctccatagagaagaaatcagtatctgagttgcataccaggcagtattaaaatctaacaggtctgtttggcccattgatagatactcaaatggtgtctccttctggttatggattttgaccattgattacctttctcaatgtaatgaagtattttacagtcaatttgtggtgtaaatgttgctcttgtctttccttgcttacaaactactttcacattgaacagctgtgagacagacatattgagatgcctgcccttgttagtattcattttatgctgcccaagatatcatttaatttagacttaacaagtatttccttgtgattatattactctgtccttgttaataaagtgctgctgtgtttgactctgaacatactaccaaaacttcttcaaagagttttttatgaaagactttcctcctttacaagaaagaaatggggtgctgcctttctgtttagtaaaagcagaatttgcagtggcatctaaagagatcttttttaaataaaaattatgtattgtggcataatcctttttttgagctctacagagaacagtcttttggtaatagtggcaggtatttattccttctgaatatataccccattataggaataactgttacttatttaggattccatcattgaaaattttgacccaaggcacagcagtgaaatttatagttctcaatttagttgtcattattgacaggcattggtattattagtcattgctaagcaactaaaacttcatcagttcaaataagttttaattgtcaaatgaagtataaacacatgaactttctagaaatatttcctcttttggataggtctttaaccagttcatatatatactttgtcaaatatatggatgtgtatgtgtacatttataagaaccagtatggatacatccattcactgtggtacattttaaaataaaatattttagcagtg

SEQ ID NO: 373 - DNA, 1379 bp, Homo sapiens
  modified_base (1027): a, t, c, g, other or unknown
  modified_base (1193): a, t, c, g, other or unknown
aacccttccggtgggctaggtactgagcgcgcgaggtgaggagttgtgcagggtttggggaaaggaaggctggcttggcgagagggcaggtttgcgggctttcgcccccttttccaaagaccaacaaagagtccttccccaactcccaactcaaccccttttggaactatgtgtggtggttgggaccctgtggcgcatccttgtcgctcgtgtccttctcatgcccggcgacgcgtctttgtggtaacgccctgctgccatctcttttcttctctatgcgaggatttggactggcagtgagaataagagacaacgattcacgtctactttctaggatgacttccatgtgctccatctcgcgcgtccctgagcatgttgaatttccaaatcctaaataagccgcgcggtgtagtttgtattatgttgcgtttctctttctgctttcctcgccctttctccatcatcctttaggctctacagagtgaaggtttaaatccaaggtcatggcaaaacatctgaagttcatcgccaggactgtgatggtacaggaagggaacgtggaaagcgcatacaggaccctaaacagaatcctcactatggatgggctcattgaggacattaagcatcggcggtattatgagaagccatgccgccggcgacagagggaaagctatgaaaggtgccggcggatctacaacatggaaatggctcgcaagatcaacttcttgatgcgaaagaatcgggcagatccgtggcagggctgctgaggcctgtgggtgggacacccagtgcgaaaccctcatccagttttctctccatctcttttctttgtacaatcccatttcctattaccattctctgcaataaactcaaatcacatgtctgcaagaaggcctccaaatatagaaacaatcccattagtcagcagtggaccctgtcttttattaagtgaaagaagaaactgagtctgaaagtactctaggagtagaatggtatttgccagggactggaggagggggcagtgatnnnnnnnnnnnnnnnnnnnnnnnnnnnnnnnnnnnnnnnnnnnnnnnnnnnnnnnnnnnnnnnnnnnnnnnnnnnnnnnnnnnnnnnnnnnnnnnnnnnnnnnnnnnnnnnnnnnnnnnnnnnnnnnnnnnnnnnnnnnnnnnnnnnnnnnnnnnnnnnnnnnnnnnggaaaatttttttaatgtagtgaaatatgtctaccatttcctacccaatttttttgaatccccaagcaaaatcttactgagaaagcatctattactttttattaaactgttccatgttaggtagagaggagaagatgcatgtatgtatttggaataaattctgcttctgaaaacacctatcaacct

SEQ ID NO: 374 - DNA, 2900 bp, Homo sapiens
  modified_base (1782)..(1800): a, t, c, g, other or unknown
tgtgctctaaaggtgatctaagcaggtcgcgtaccttcctcaggtgactccggccacagcccattgtccgcggccaccggcggagtttagccgcagacctcgaagcgccccggggtccttcccgaacggcagcggctgcggcgggtccatggagaagggccctgtgcgggcaccggcggagaagccgcggggcgccaggtgcagcaatgggttccccgagcgggatccgccgcggcccgggcccagcaggccggcggagaagcccccgcggcccgaggccaagagcgcgcagcccgcggacggctggaagggcgagcggccccgcagcgaggaggataacgagctgaacctccctaacctggcagccgcctactcgtccatcctgagctcgctgggcgagaacccccagcggcaagggctgctcaagacgccctggagggcggcctcggccatgcagttcttcaccaagggctaccaggagaccatctcagatgtcctaaacgatgctatatttgatgaagatcatgatgagatggtgattgtgaaggacatagacatgttttccatgtgtgagcatcacttggttccatttgttggaaaggtccatattggttatcttcctaacaagcaagtccttggcctcagcaaacttgcgaggattgtagaaatctatagtagaagactacaagttcaggagcgccttacaaaacaaattgctgtagcaatcacggaagccttgcggcctgctggagtcggggtagtggttgaagcaacacacatgtgtatggtaatgcgaggtgtacagaaaatgaacagcaaaactgtgaccagcacaatgttgggtgtgttccgggaggatccaaagactcgggaagagttcctgactctcattaggagctgagcttcattcagtgtgtgtgcgttggttgccgatcgtactgccagtagcattgtctgtctgtccggtcttgtttgtacattccattttcaattgttacagatgtgaactttattccttgtcactaattatatttaaaattatttctaggaagtcaaataaatataataaagggttgagccctctactttcttcttgccacctttttgtggcaatattaaagtgaactgctaatagtgtaagtacgtgcacaaaaccactgccagataaccagaggggcctgggaagggagaagaattagtgtatttttttcaaatagtacagtaatttgcctcataagcataggagcattgggaatgagagggaactgtgcccagtatactgttttttttcttcctccaataaaagtggtgtagtgccgaaagtgctaaaatatttagtgcggtattgctctgtgaattcaagttcaacagacttcactttggtcatgtttattaaaccaccagtgacatttaaaaatatatttttagcagtcgtaatgttagtcaccaagggaaggtggtggaatgtctatgtttttgattttactgtgagttaaaaaggcacatttctaccttctattgtttttaaattcaagaatagggaattagttcctggtgttgtttacgagtgtattctcgtgtcaacatacagggatttagacatttaactctctgtgccttgataagaatatcatttagagtgtagatacttttgcctttttaaaaaagccattattttatgagacttagtactcacactgcaaataactagtcagctcagttttaactttataggtttattgagtttcctttgtgtgatccatgtagatgcctcaaaatgtnnnnnnnnnnnnnnnnnnnaatcttataagatatttttctaagtatttccagaaacatttgagagtgcccatcattttcaggtctgcagaaccatagcttccacgcacctgaacgagcacagaatgaactgacggtggaagacattatgagctgtgtccaacgttttaaccaaagcgtatcgtaccaacgatctgtgaaaatgcactggaagcttctggtcccggtttcctttgtggtctatgtgggtcttgtcctcattgtaactccgtatagatggtataggtattttaatcctggaagctgttgccttattaatgattatcttaaaatttcctccatggggcagcgtgggccaaattaaaacaaacaaaaccgcaactcctccacagaaacacaaacacagttattccatgaagtttagtatttggttgacatagtgctcttcaaattcatcccattaccctaaaagtaataactttgatgcttgctttaactttagtcccatctctgccactttgatgctatttgggttatgatggggcaagatggcagaggtattgggtttttttgtttttttccattcctctctacttctgtttcctagctttttctttctggagtttaagtacagtgatggttggcttgagtacctttttaaatctagcccagtataaacattagcctgcttaatatttagacatttataggtagaattctgagcactcaactcatgtttggcattttaaagtaaaaacaagtgtgacttcgaggaccaaagaaattgtcagctatacatttatctttatgaactcatttatattcctttttaatgactcgttgttctaacatttcctagaagtgttcttataaaggtctaatgtatccacaggctgttgtcttattagtaaatgcaaagtaatgactttgtctgttttactctagtctttagtacttcaaaattaccttttcatatccatgatcttgagtccatttgggggatttttaagaatttgatgtatttcaatacactgttcaaaattaaattgtttaattttatgtatgagtatgtatgttcctgaagttggtcctatttaaattattaaactattgtaactttg

SEQ ID NO: 375 - DNA, 825 bp, Homo sapiens
gaaaatgtatccaaggaaacattttatcattaaaaattacctttaattttaatgctgtttctaagaaaatgtagttagctccataaagtacaaatgaagaaagtcaaaaaattatttgctatggcaggataagaaagcctaaaattgagtttgtagaactttattaagtaaaatccccttcgctgaaattgcttatttttggtgttggatagaggatagggagaatatttactaactaaataccattcactactcatgcgtgagatgggtgtacaaactcatcctcttttaatggcatttctctttaaactatgttcctaacaaaatgagatgataggatagatcctggttaccactcttttgctgtgcacatacgggctctgactggttttaatagtcaccttcatgattatagcaactaatgtttgaacaaagctcaaagtatgcaatgcttcattattcaagaatgaaaaatataatgttgataatatatattaagtgtgccaaatcagtttgactactctctgttttagtgtttatgtttaaaagaaatatattttttgttattattagataatatttttgtatttctctattttcataatcagtaaatagtgtcatataaactcatttatctcctcttcatggcatcttcaatatgaatctataagtagtaaatcagaaagtaacaatctatggcttatttctatgacaaattcaagagctagaaaaataaaatgtttcattatgcacttttagaaatgcatatttgccacaaaacctgtattactgaataatatcaaataaaatatcataaagcatttt

SEQ ID NO: 376 - DNA, 1710 bp, Homo sapiens
gcctcggtgttcccacctaggggcgggcagccaggggcacttccgctggcccaagtgatctgcatgtggcagggctgcgcagtgtgagcggccagtgggcaggatgacgagccagacccctctgccccagtccccccggcccaggcggccgacgatgtctactgttgtggagctgaacgtcgggggtgagttccacaccaccaccctgggtaccctgaggaagtttccgggctcaaagctggcagagatgttctctagcttagccaaggcctccacggacgcggagggccgcttcttcatcgaccgccccagcacctatttcagacccatcctggactacctgcgcactgggcaagtgcccacacagcacatccctgaagtgtaccgtgaggctcagttctacgaaatcaagcctttggtcaagctgctggaggacatgccacagatctttggtgagcatggtgtctcggaagcagtttttgctgcaagtgccgggctacagcgagaacctggagctcatggtgcgcctggcacgtgcagaagccataacagcacggaagtccagcgtgcttgtgtcctggtggaaactgaggagcaggatgcatattattcagaggtcctgtgttttctgcaggataagaagatgttcaagtctgttgtcaagtttgggccctggaaggcggtcctagacaacagcgacctcatgcactgcctggagatggacattaaggcccaggggtacaaggtattctccaagttctacctgacgtaccccaccaaaagaaacgaattccattttaacatttattcattcaccttcacctggtggtgatcctcaggagcagagactgttatgaattctggcgtggcttatgaaattaaaagttgccatcaaagccattttcttttaatttcacaaacatcaggcaatttccagggttggtctagagtcttgccactaaatattgatcactcgtttaaggactttccactccattgcaactgatgccactatatttgcctagcaacttgcagctacttccttttcaaagcctcatgtatctcccagacccttctcttgaagtccaataacaagaccaagtaagaatgtttcaacaatgcgttggcaagagatgtgagatgacaacaggaacatacaagatactgtgaatctagatgttctgacctaaagatgtagtctacatagccccagcttggggtccaatccatctgtccctggcatgtgccttcatgtagtaggtgctttcctgatcccctttgcgagatgctgtgggtgctaacacctcagagctgtcctcttctctagagtggaggttttcaaagtgcatcatcagcattacctgtgaacttgctggaaatacaaatcctcaggccccacctcagacctactgaatcagaatctctgggggttgggcacagcattctgatttaccaaaccctccaagtgattttgatgtattctaattttgagaccatctctagaaaagaattgctacctcttgtatggaggtacaaaagactgacctcttacatcaaggaacttcctttcccagagctcctcatggaatcaagctgaagtcagtcttcttctgagagcacattcttactcagtttttttcctctgtcctacgctgcttccctcactccccttctcctaagagcactccatcaataaaccacttgcacgag

SEQ ID NO: 377 - DNA, 597 bp, Homo sapiens
gggttacggcgcaggcgcaagataagctaggagccgcgcgagtcgtagtgtcgctgtttgcgggtctccgcgcgggaccggggcgcagcggggtcgctgaggcgagggtgtcatgtcagacaacgaggacaattttgatggcgacgactttgatgatgtggaggaggatgaagggctagatgacttggagaatgccgaagaggaaggccaggagaatgtcgagatcctcccctctggggagcgaccgcaggccaaccagaagcgaatcaccacaccatacatgaccaagtacgagcgagcccgcgtgctgggcacccgagcgctccagattgcgatgtgtgcccctgtgatggtggagctggagggggagacagatcctctgctcattgccatgaaggaactcaaggcccgaaagatccccatcatcattcgccgttacctgccagatgggagctatgaagactggggggtggacgagctcatcatcaccgactgagctggagtcatcttcctgcccttgccccatgcccaattttcattctcactttatatgtgtaaataataaaatattcaactttccaaaaaaaaaaaaaaggg

SEQ ID NO: 378 - DNA, 2972 bp, Homo sapiens
cggggtaggatccggaacccattcggaaggctttttgcaagcatttacttggaaggagaacttgggatctttctgggaaccccccgccccggctggattggccgagcaagcctggaaaatggtaaatgatcatttggatcaattacaggcttttagctggcttgtctgtcataattcatgattcggggctgggaaaaagaccaacagcctacgtgccaaaaaaggggcagagtttgatggagttgggtggacttttctatgccatttgcctccacacctagaggataagcacttttgcagacattcagtgcaagggagatcatgtttgactgtatggatgttctgtcagtgagtcctgggcaaatcctggatttctacactgcgagtccgtcttcctgcatgctccaggagaaagctctcaaagcatgcttcagtggattgacccaaaccgaatggcagcatcggcacactgctcaatcaattgaaacacagagcaccagctctgaggaactcgtcccaagccccccatctccacttcctccccctcgagtgtacaaaccctgcttcgtctgccaggacaaatcatcagggtaccactatggggtcagcgcctgtgagggatgtaagggctttttccgcagaagtattcagaagaatatgatttacacttgtcaccgagataagaactgtgttattaataaagtcaccaggaatcgatgccaatactgtcgactccagaagtgctttgaagtgggaatgtccaaagaatctgtcaggaatgacaggaacaagaaaaagaaggagacttcgaagcaagaatgcacagagagctatgaaatgacagctgagttggacgatctcacagagaagatccgaaaagctcaccaggaaactttcccttcactctgccagctggctaaatacaccacgaattccagtgctgaccatcgagtccgactggacctgggcctctgggacaaattcagtgaactggccaccaagtgcattattaagatcgtggagtttgctaaacgtctgcctggtttcactggcttgaccatcgcagaccaaattaccctgctgaaggccgcctgcctggacatcctgattcttagaatttgcaccaggtataccccagaacaagacaccatgactttctcagacggccttaccctaaatcgaactcagatgcacaatgctggatttggtcctctgactgaccttgtgttcacctttgccaaccagctcctgcctttggaaatggatgacacagaaacaggccttctcagtgccatctgcttaatctgtggagaccgccaggaccttgaggaaccgacaaaagtagataagctacaagaaccattgctggaagcactaaaaatttatatcagaaaaagacgacccagcaagcctcacatgtttccaaagatcttaatgaaaatcacagatctccgtagcatcagtgctaaaggtgcagagcgtgtaattaccttgaaaatggaaattcctggatcaatgccacctctcattcaagaaatgatggagaattctgaaggacatgaacccttgaccccaagttcaagtgggaacacagcagagcacagtcctagcatctcacccagctcagtggaaaacagtggggtcagtcagtcaccactcgtgcaataagacattttctagctacttcaaacattccccagtaccttcagttccaggatttaaaatgcaagaaaaaacatttttactgctgcttagtttttggactgaaaagatattaaaactcaagaaggaccaagaagttttcatatgtatcaatatatatactcctcactgtgtaacttacctagaaatacaaacttttccaattttaaaaaatcagccatttcatgcaaccagaaactagttaaaagcttctattttcctctttgaacactcaagatgcatggcaaagacccagtcaaaatgatttacccctggttaagtttctgaagactttgtacatacagaagtatggctctgttctttctatactgtatgtttggtgctttccttttgtcttgcatactcaaaataaccatgacaccaaggttatgaaatagactactgtacacgtctacctaggttcaaaaagataactgtcttgctttcatggaatagtcaagacatcaaggtaaggaaacaggactattgacaggactattgtacagtatgacaagataaggctgaagatattctactttagttagtatggaagcttgtctttgctctttctgatgctctcaaactgcatcttttatttcatgttgcccagtaaaagtatacaaattccctgcactagcagaagagaattctgtatcagtgtaactgccagttcagttaatcaaatgtcatttgttcaattgttaatgtcactttaaattaaaagtggtttattacttgtttaatgacataactacacagttagttaaaaaaaatttttttacagtaatgatagcctccaaggcagaaacacttttcagtgttaagtttttgtttacttgttcacaagccattagggaaatttcatgggataattagcaggctggtctaccactggaccatgtaactctagtgtccttcctgattcatgcctgatattgggatttttttccagcccttcttgatgccaagggctaattatattacatcccaaagaaacaggcatagaatctgcctcctttgaccttgttcaatcactatgaagcagagtgaaagctgtggtagagtggttaacagatacaagtgtcagtttcttagttctcatttaagcactactggaatttttttttttgatatattagcaagtctgtgatgtactttcactggctctgtttgtacattgagattgtttgtttaacaatgctttctatgttcatatactgtttacctttttccatggactctcctggcaaagaataaaatatatttatttt

SEQ ID NO: 379 - DNA, 1891 bp, Homo sapiens
catggacaggtccaggtactcctggttggagtcacaggccacgatgcggtccaggtcttccaccagctgcttgaaggtgggtctctgtgagggcactgcatgccagcagtcccgcatcatcatgtacagctcgttggtgcagttactgggcttctcatcatggcggaccctagagataaggcgcttcaggactaccgcaagaagttgcttgaacacaaggagatcgacggccgtcttaaggagttaagggaacaattaaaagaacttaccaagcagtatgaaaagtctgaaaatgatctgaaggccctacagagtgttgggcagatcgtgggtgaagtgcttaaacagttaactgaagaaaaattcattgttaaagctaccaatggaccaagatatgttgtgggttgtcgtcgacagcttgacaaaagtaagctgaagccaggaacaagagttgctttggatatgactacactaactatcatgagatatttgccgagagaggtggatccactggtttataacatgtctcatgaggaccctgggaatgtttcttattctgagattggagggctatcagaacagatccgggaattaagagaggtgatagaattacctcttacaaacccagagttatttcagcgtgtaggaataatacctccaaaaggctgtttgttatatggaccaccaggtacgggaaaaacactcttggcacgagccgttgctagccagctggactgcaatttcttaaaggttgtatctagttctattgtagacaagtacattggtgaaagtgctcgtttgatcagagaaatgtttaattatgctagagatcatcaaccatgcatcatttttatggatgaaatagatgctattggtggtcgtcggttttctgagggtacttcagctgacagagagattcagagaacgttaatggagttactgaatcaaatggatggatttgatactctgcatagagttaaaatgatcatggctacaaacagaccagatacactggatcctgctttgctgcgtccaggaagattagatagaaaaatacatattgatttgccaaatgaacaagcaagattagacatactgaaaatccatgcaggtcccattacaaagcatggtgaaatagattatgaagcaattgtgaagctttcggatggctttaatggagcagatctgagaaatgtttgtactgaagcaggtatgttcgcaattcgtgctgatcatgattttgtagtacaggaagacttcatgaaagcagtcagaaaagtggctgattctaagaagctggagtctaaattggactacaaacctgtgtaatttactgtaagatttttgatggctgcatgacagatgttggcttattgtaaaaataaagttaaagaaaataatgtatgtattggtaatgatgtcattaaaagtatatgaataaaaatatgagtaacatcataaaaattagtaattcaacttttaagatacagaagaaatttgtatgtttgttaaagttgcatttattgcagcaagttacaaagggaaagtgttgaagcttttcatatttgctgcgtgagcattttgtaaaatattgaaagtggtttgagatagtggtataagaaagcatttcttatgacttattttgtatcatttgttttcctcatctaaaaagttgaataaaatctgtttgattcagttctcctacaaaaaaagtcataagaaatgctttcttataccactatctcaaaccactttcaatattttacaaaatgctcacgcagcaaatatgaaaagcttcaacactttccctttgtaacttgctgcaataaatgcaactttaacaaacatacaaatttcttctgtatcttaaaagttgaattactaattttta

SEQ ID NO: 380 - DNA, 4637 bp, Homo sapiens
  modified_base (1096)..(1115): a, t, c, g, other or unknown
cgcgatctagaacccaaacctaacagtatatattttatcattttcaagggagtcatgctccattgcgggcccttcggtttcgtggctcccatgtccccctctccacctcccgccaaaacggcgcagcgtgacaagccatatgttccactccggtgggggcgagagagaagcaacaataagttaaaagtgccgcctccctccacctctttaccttcattcttaccaaagtaaccttttttcattgttctagagtcttgaggtgtgtgtggggaggatggaggaggagggagggttgtggcgccgcccagaattcggagcgcgcgtggaaagtagtgagttgctcggtgggctttttctgggaggaaggggcattcaggaaggattagggttttcttgactaaaaagtttaaagattggatgcgtgaaaagaaacggcacgcctaggcctggtaaaacaaacaatcgtcccgggttgtggtcttttttttgcggcgccccccacccgcccacacccggagagcgccggctgcaaagcgagcgcgagtgtcgacgcgtgcgacgcactaaattgtgccgcgctcgcgccccgccagaccatgtcctcctggggaaaaagtttccctagtccccccagcaccgcgccccaccctacgccccgctggaaaaaaaacagcaacataaaatcctaggcttgaacattctgtgcgtcccaaatttctaatgtcctcggcctgcccggtttgccgaagggagccgagtgtcgaagagaagtcgggtaaaggtaagttgtgcagacacttggggaagtttcaaggagaccgccagctcaagatggaaaccgcggcccgggcgctaaggacgggcttcagctcccgctggcaaaaagagaaagtcgagcccgccttcctgcccaacaaaaaacaacaacatgacaacaagaaccccggagggagtggaatgagtgacgtcacagccgcgctctgaggctgacaaaggagggggcgcgcccctcccgctctgcgcccgcgcggccccggagagggggcgcctgaagcgccgggtagggaagtcagccgacttgaaacttttcctcttnnnnnnnnnnnnnnnnnnnngttgtgcgcggctcacagtggggttttttttttttccgccttcttttctcgtctccctcccccttcttccttttgaaagtttcttctcctccccctgccccccctccccgcctgaccgcatggctgattcaactccagtgtcaatcaacttctttttcctcctcttcctcatttaaataagtttaaagctcctcctccccccggcccaccaaatctgaactttataaattgggctttgcgcgccccagcccggagtcagaaaggcgaggggcgccgggaactggcgtgtgggactccagacaggagaggctgcgccttccccgcaccgggaccttcgcgacacaccagatcctcgcccctggctcgcgcgaacgcacaggatgaccaccaccctcgtgtctgccaccatcttcgacttgagcgaagttttatgcaaggtaaaggggggcggagcatttgcttttcaaaaagtctttttcttttgccttaagaaagaacccccaaaagtttgggtcttggaaggcaatggggaaagtggtgcagcgagatgattcttttctcctccggcatttctcccaagtttgaaggaatttggccccgtccttcccaccctttgagtttcaacagttgctggcggggattacatgtgaatctggaggccagggttttgaggggcgaagtttgcctggcagggcagcccgggggcttcggggggagggctgggattgggacaagttttgggcgatcctgttttacgtaacgtgctgctggatcccaggtttgctggtctgatcgggttcccagtctgcgccctaggtctgcccagcggcattacccacccgtggggttgggagtgggaggtccctcggggaagtgagtctcgggacaatgttttcctccactctttggggggagctggggatatgcgaggaagaaaggccaagttgtgattcaaaaagatgttgcagaacaagtttgcagtggggcttgagtccgccctagctccgttgggcttcttcccgcgatagccgatcgtgcagcaaactttggggtgaaagaggcattcaggttgacccgcttacctgtgttgccgaggcattgcggctcatcgattgcgggcggggttggggggggaggtggcgacaaaatgctggcttgaactcgagagtcccgcgagtaaggatttaatgggggcctccttaaaacatgttgcttgtcagccagtgttgaaaaagcaagttttaaactcggaatgttccaggactgcggtttaaatgtacatagcaaaagtctatggatgttgttaaatttctttccaacctccccctcccaatttgaaagggtgaagctgctgggctactttttaattgctgaagtgttttgccttctccagccaggagctggcaagcctctttgcccctagcatggggctgcccgggggtggctccccgaccaccttcctcttccggcccatgtccgagtcccctcacatgtttgactctccccccagccctcaggattctctctcggaccaggagggctacctgagcagctccagcagcagccacagtggctcagactccccgaccttggacaactcaagacgcctgcccatcttcagcagactttccatctcagatgactaagccagggtagggagggacctcctgcctactccagcccctaccctgcacccacatcccataccctcttctccctacccatcccattccccacaggccctacattaacaaggttaagctcaacccctttcccccagcacctcagaatgtgccctccctctccccctcataaccccacctaacataaggacaagtcaatttgtcagtagcttcttctggcttgaaaccccctccctgggattttatagcccacttaccatgcataacagacaagtcccatattttgtcagtagatgcctttttttttccggcttaagccttaagtgccaaatcacaagagaaaaagcagtaacagtttacagaagcaacttagtgccttgtaatctaactttgtcactgtgactacattacctcttcagcgccagagggcacccgtgggcctcccggagcctctgcccatggcggggtggagacccggaaccagcagccccctccactggcgacacaactgcaccttccctcatttcagtctcccgcacacttattcctcctcccctcttcccggtggcacctctccacctgtacccgcccccgccccaccaccccggccccttggaagagttgttgccagaccagggttttgggggaaacctgtcttgacattcaaaacctttttcttcccgatctgaacccctgttgactaatcttgcctgggtttgtgtaggtctgcaggaaggaaggctgaaaaagcggacgaagattttgacttaagtgggactttgtgatttaattttttcttttttttaagtggggaggaaggggaagctagatggactaggagagacttgattttggtgctaaagttccccagttcatatgtgacatctttttaaaaaaaataacaacaaaaaaaaaatgagagaaaagctaaaaaaaaaaaagtaaggggtgagcagttaatggtattcattccacatacaatatctgtgtaaaacgatttcctgtagaagtagctttaatggtttttgctctagaataccgtaggtctatccttagagcactcacgccatgctttcttccctgggttttaaacttcatataactttcagaaattggagagcaaaaattttgcttgtcactgcacatcaatataaaaaagcttatttaacttatcaaaacgtatttattgccaaactatgcttttttttgttaattttgttcatatttatcgggatgacaaatccatagaatatattcttttatgttaaattatgatcttcatattaatcttaaaattttgtgacgtgtctttttcctttttttccacagttttaatatattattcttcaacgacattttttgtaactttacacttttttggttattttattttaaaaaaaatgaaaaattaatttaaaaaaatgcaaaaaactgttggattatttattttagaaattcccccctttgtgttggactgcaaattgagtttctttctctttaggcctttcacaactaggactgagaatgtatgtaaaagttctgtgacagtacagaaggaaaacaactttttatgtatagcttctaaaaggggaaaaaaaaaaaaaagagaaaccctttgacttccacgtgcccatctcaagacattccactcacagatttgaggttctggattccaggtctggagttttccaatgttaatgtaaacagaactggcacacacacattaagatgaatgtaattattattcctcttgctggtcactaccgtcgctttctatttctctttctttgtgtgaatttatttaaaagaaaaaaaaactttttgtaacgactatttgcagtttaaaaatcaataaaccccgttttttcaagaaacaaaa

SEQ ID NO: 381 - DNA, 724 bp, Homo sapiens
ccatctttgtatatttacatgcttagaggggtgaaaattattttggaaattgagtctgaagcactctcgcacacacagtgattccctcctcccgtcactccacgcagctggcagagagcacagtgatcaccagcgtgagtggtggaggaggacacttggatatttttttagtttttttttttttggcttaacagttttagaatacattgtacttatacaccttattaatgatcagctatatactatttatatacaagtgataatacagatttgtaacattagttttaaaaagggaaagttttgttctgtatattttgttaccttttacagaataaaagaattacatatgaaaaaccctctaaaccatggcacttgatgtgatgtggcaggagggcagtggtggagctggacctgcctgctgcagtcacgtgtaaacaggattattattagtgttttatgcatgtaatggactatgcacacttttaattttgtcagattcacacatgccactatgagctttcagactccagctgtgaagagactctgtttgcttgtgtttgtttgcagtctctctctgccatggccttggcaggctgctggaaggcagcttgtggaggccgttggttccgcccactcattccttctcgtgcactgctttctccttcacagctaagatgccatgtgcaggtggattccatgccgcagacatgaaataaaagctttg

SEQ ID NO: 382 - DNA, 3736 bp, Homo sapiens
ggaggcggggcctcggaaaggcggacaggaaggcgtgtgcaaggcggggtccggcccgcgcaggtcgggtaagcgcgtctagggcgctgcgcggcgcagcgaaaatggcggcttccaggtgggcgcgcaaggccgtggtcctgctttgtgcctctgacctgctgctgctgctgctactgctaccaccgcctgggtcctgcgcggccgaaggctcgcccggggacgcccgacgagtctaccccacctccccggaagaagaagaaggatattcgcgattacaatgatgcagacatggcgcgtcttctggagcaatgggagaaagatgatgacattgaagaaggagatcttccagagcacaagagaccttcagcacctgtcgacttctcaaagatagacccaagcaagcctgaaagcatattgaaaatgacgaaaaaagggaagactctcatgatgtttgtcactgtatcaggaagccctactgagaaggagacagaggaaattacgagcctctggcagggcagccttttcaatgccaactatgacgtccagaggttcattgtgggatcagaccgtgctatcttcatgcttcgcgatgggagctacgcctgggagatcaaggactttttggtcggtcaagacaggtgtgctgatgtaactctggagggccaggtgtaccccggcaaaggaggaggaagcaaagagaaaaataaaacaaagcaagacaagggcaaaaaaaagaaggaaggagatctgaaatctcggtcttccaaggaagaaaatcgagctgggaataaaagagaagacctgtgatggggcagcagtgacgcgctgtggggggacaggtggacgtggagagctctttgcccagctcctggggtgggagtggtctcaggcaactgcacaccggatgacattctagtgtcttctagaaagggtctgccacatgaccagtttgtggtcaaagaattactgcttaataggcttcaagtaagaagacagatgttttctaattaatactggacactgacaaattcatgtttactataaaatctccttacatggaaatgtgactgtgttgctttttcccatttacacttggtgagtcatcaactctactgagattccactcccctccaagcacctgctgtgattgggtggcctgctctgatcagatagcaaattctgatcagagaagactttaaaactcttgacttaattgagtaaactcttcatgccatatacatcattttcattatgttaaaggtaaaatatgctttgtgaactcagatgtctgtagccaggaagccagggtgtgtaaatccaaaatctatgcaggaaatgcggagaatagaaaatatgtcacttgaaatcctaagtagttttgaatttctttgacttgaatcttactcatcagtaagagaactcttggtgtctgtcaggttttatgtggtctgtaaagttaggggttctgttttgtttccttatttaggaaagagtactgctggtgtcgaggggttatatgttccatttaatgtgacagttttaaaggatttaagtagggaatcagagtcctttgcagagtgtgacagacgactcaataacctcatttgtttctaaacatttttctttgataaagtgcctaaatctgtgctttcgtatagagtaacatgatgtgctactgttgatgtctgattttgccgttcatgttagagcctactgtgaataagagttagaacatttatatacagatgtcatttctaagaactaaaattctttgggaaaaaccctcaattgtgattttaataaattaaaagtagcacattacatggttagaaaatgtcagtgttaaagaatggtacaaagtgaaaagtgtatccctctcttgccgccggtggtagcttgtcccagtggaagctgctgttaacaatttgtgcccccacatccccctccctgcccatccaccaaaaaaaagtacatttacttatgtaaatgtacttatggtgatgtatgtttgttttggcctcacagcatctgtttccccttaatttggtagctgctcacatttccctcgaaagaaccacaccctctgcattctcagttctttgctttggatgggacatttgccctgcagtccccccaccctccaggccatgccctctccagggtgaggcctgtgtgatctaccgtactagggtactaggccctgaaagaggcttttcttgttcctcctgcatcttgaacctggagcgggagctgttgtaggccccgcccttggagaagagaactgtctgacagtggggagagagcgccacaccctggtggcataaacgagtccctgaatcatgccgtggctgaaccaagccctgtctgtgggctttttctgttgtactcagggcagtttgatggggttactgtcctgcatagccataatggcccagtataaagcagctgttttgatgagataattgctttaattaagcaaaaggtagcaaagctttcactccgccctgtaccttctgtttccacttaggagccttcccatgtcagaatgtgcagatctgtctcattgtttcctgtgcagtgtgcccccacttcacccagtagtttctgtgtgtctgttatgtactaggtactacaaggtgccaggacggtgtagatacagcctctgctatcgtaaaactcaatgattcggtgggggaagacaaatgtcagtaatgtacaaagtaaaatggcagctgttagaagtatgaaaggggcagggtagggggaggtagaatcttccctgaccaggttaagaaaaccagaggccttctctgagggcaagaggaggagaggagaaatagagtaaggcaggcagaggaaacagtctgagctaagaccctgtggctagaagtggcagagggagaggcagcaggaaggccagcggggaggctggggcccagtgcaggcccaggttggaggagcgtagcacatggagtttggtaggagtttgggacgccctggtggatcttaattgtgatggggtgggtgtgaaaggcagtccaggttgcactggttgcacaggagaagtgatcagaagaggaccccagcaggtgtgagccgtgagcagaggtgcttcagtagtgcaggccatagctgaaggtgtcctacatcagcagggtgatggtgaggtttgaaccactgtttcactgcatagtccctgctgatggacacttgagtgttcagattttttgctggtatattcagtgctgcagtggacattttcatacaaaatatttcggtacacttttgtttatatctgaaaggtaaattcctagcagtagaattattagagcaaacggaatttaacattttggtgtgtattgccaaattgccctcccaagtggtttagtcagcttacccttgccaacaatagatctatccttgccagccttgggcatcacatttaccagtttaatagattgtaaaaccatatcttaattggctaccctgaagccaccatactggagaggctgcgtacagtgtttcacgtagagagagggatacccaggaggcccacctgctccaaccccagctgcatgagtcttcccagcccaggcacagacatgtggataagatttaaacatttccagccccagccttcaagcaatcctagttgacactgaggggagccaacataagctgagctgagaaacagtctgcccagtctgcagattcatgagcaaaagaaatgttg

SEQ ID NO: 383 - DNA, 2344 bp, Homo sapiens
agcacagtcggagaccgcagcccggagcccgggccagggtccacctgtccccgcagcgccggctcgcgccctcctgccgcagccaccgagccgccgtctagcgccccgacctcgccaccatgagagccctgctggcgcgcctgcttctctgcgtcctggtcgtgagcgactccaaaggcagcaatgaacttcatcaagttccatcgaactgtgactgtctaaatggaggaacatgtgtgtccaacaagtacttctccaacattcactggtgcaactgcccaaagaaattcggagggcagcactgtgaaatagataagtcaaaaacctgctatgaggggaatggtcacttttaccgaggaaaggccagcactgacaccatgggccggccctgcctgccctggaactctgccactgtccttcagcaaacgtaccatgcccacagatctgatgctcttcagctgggcctggggaaacataattactgcaggaacccagacaaccggaggcgaccctggtgctatgtgcaggtgggcctaaagccgcttgtccaagagtgcatggtgcatgactgcgcagatggaaaaaagccctcctctcctccagaagaattaaaatttcagtgtggccaaaagactctgaggccccgctttaagattattgggggagaattcaccaccatcgagaaccagccctggtttgcggccatctacaggaggcaccgggggggctctgtcacctacgtgtgtggaggcagcctcatgagcccttgctgggtgatcagcgccacacactgcttcattgattacccaaagaaggaggactacatcgtctacctgggtcgctcaaggcttaactccaacacgcaaggggagatgaagtttgaggtggaaaacctcatcctacacaaggactacagcgctgacacgcttgctcaccacaacgacattgccttgctgaagatccgttccaaggagggcaggtgtgcgcagccatcccggactatacagaccatctgcctgccctcgatgtataacgatccccagtttggcacaagctgtgagatcactggctttggaaaagagaattctaccgactatctctatccggagcagctgaaaatgactgttgtgaagctgatttcccaccgggagtgtcagcagccccactactacggctctgaagtcaccaccaaaatgctgtgtgctgctgacccacagtggaaaacagattcctgccagggagactcagggggacccctcgtctgttccctccaaggccgcatgactttgactggaattgtgagctggggccgtggatgtgccctgaaggacaagccaggcgtctacacgagagtctcacacttcttaccctggatccgcagtcacaccaaggaagagaatggcctggccctctgagggtccccagggaggaaacgggcaccacccgctttcttgctggttgtcatttttgcagtagagtcatctccatcagctgtaagaagagactgggaagataggctctgcacagatggatttgcctgtgccacccaccagggtgaacgacaatagctttaccctcaggcataggcctgggtgctggctgcccagacccctctggccaggatggaggggtggtcctgactcaacatgttactgaccagcaacttgtctttttctggactgaagcctgcaggagttaaaaagggcagggcatctcctgtgcatgggtgaagggagagccagctcccccgacggtgggcatttgtgaggcccatggttgagaaatgaataatttcccaattaggaagtgtaacagctgaggtctcttgagggagcttagccaatgtgggagcagcggtttggggagcagagacactaacgacttcagggcagggctctgatattccatgaatgtatcaggaaatatatatgtgtgtgtatgtttgcacacttgtgtgtgggctgtgagtgtaagtgtgagtaagagctggtgtctgattgttaagtctaaatatttccttaaactgtgtggactgtgatgccacacagagtggtctttctggagaggttataggtcactcctggggcctcttgggtcccccacgtgacagtgcctgggaatgtacttattctgcagcatgacctgtgaccagcactgtctcagtttcactttcacatagatgtccctttcttggccagttatcccttccttttagcctagttcatccaatcctcactgggtggggtgaggaccactccttacactgaatatttatatttcactatttttatttatatttttgtaattttaaataaaagtgatcaataaaatgtgatttttctga

SEQ ID NO: 384 - DNA, 3280 bp, Homo sapiens
gggacaggagaggagctgaatcctgagattgtatcgctaggagcccccaaagtacgatgacggtcctcgggccagcatgggggtgcattggcaccatgtaaggaaaggggccctcccgtggcaccgttggagtggggcggtgtggggttgttcggagagaaaagtttcccatgagctctgtttcagcaaacggcgatgaccactttcgtggcaactaaacagtcttgccttcctgcacgtggacatttttcttcatgcatatttctcttgcaaatggttctattgtttgtataacagtatttcatgagcggagaagagttggaagcaaaaatctgttcatgagaaatagcttgtcaggaagatcggaggtgccaagtagcagagaaagcatcccccagctctgacagggagacagcacatgtctaaggcccacaagccttggccctaccggaggagaagtcaattttcttctcgaaaatacctgaaaaaagaaatgaattccttccagcaacagccaccgccattcggcacagtgccaccacaaatgatgtttcctccaaactggcagggggcagagaaggacgctgctttcctcgccaaggacttcaactttctcactttgaacaatcagccaccaccaggaaacaggagccaaccaagggcaatggggcccgagaacaacctgtacagccagtacgagcagaaggtgcgcccctgcattgacctcatcgactccctgcgggctctgggtgtggagcaggacctggccctgccagccatcgccgtcatcggggaccagagctcgggcaagagctctgtgctggaggcactgtcaggagtcgcgcttcccagaggcagcggaatcgtaaccaggtgtccgctggtgctgaaactgaaaaagcagccctgtgaggcatgggccggaaggatcagctaccggaacaccgagctagagcttcagagaccctggccaggtggagaaagagatacacaaagcccagaacgtcatggccgggaatggccggggcatcagccatgagctcatcagcctggagatcacctcccctgaggttccagacctgaccatcattgaccttcccggcatcaccagggtggctgtggacaaccagccccgagacatcggactgcagatcaaggctctcatcaagaagtacatccagaggcagcagacgatcaacttggtggtggttccctgtaacgtggacattgccaccacggaggcgctgagcatggcccatgaggtggacccggaaggggacaggaccatcggtatcctgaccaaaccagatctaatggacaggggcactgagaaaagcgtcatgaatgtggtgcggaacctcacgtaccccctcaagaagggctacatgattgtgaagtgccggggccagcaggagatcacaaacagggctgagcttggcagaggcaaccaagaaagaaattacattctttcaaacacatccatatttcagagttctcctggaggaggggtcagccacggttccccgactggcagaaagacttaccactgaactcatcatgcatatccaaaaatcgctcccgttgttagaaggacaaataagggagagccaccagaaggcgaccgaggagctgcggcgttgcggggctgacatccccagccaggaggccgacaagatgttctttctaattgagaaaatcaagatgtttaatcaggacatcgaaaagttagtagaaggagaagaagttgtaagggagaatgagacccgtttatacaacaaaatcagagaggattttaaaaactgggtaggcatacttgcaactaatacccaaaaagttaaaaatattatccacgaagaagttgaaaaatatgaaaagcagtatcgaggcaaggagcttctgggatttgtcaactacaagacatttgagatcatcgtgcatcagtacatccagcagctggtggagcccgcccttagcatgctccagaaagccatggaaattatccagcaagctttcattaacgtggccaaaaaacattttggcgaatttttcaaccttaaccaaactgttcagagcacgattgaagacataaaagtgaaacacacagcaaaggcagaaaacatgatccaacttcagttcagaatggagcagatggttttttgtcaagatcagatttacagtgttgttctgaagaaagtccgagaagagatttttaaccctctggggacgccttcacagaatatgaagttgaactctcattttcccagtaatgagtcttcggtttcctcctttactgaaataggcatccacctgaatgcctacttcttggaaaccagcaaacgtctcgccaaccagatcccatttataattcagtattttatgctccgagagaatggtgactccttgcagaaagccatgatgcagatactacaggaaaaaaatcgctattcctggctgcttcaagagcagagtgagaccgctaccaagagaagaatccttaaggagagaatttaccggctcactcaggcgcgacacgcactctgtcaattctccagcaaagagatccactgaagggcggcgatgcctgtggttgttttcttgtgcgtactcattcattctaaggggagtcggtgcaggatgccgcttctgctttggggccaaactcttctgtcactatcagtgtccatctctactgtactccctcagcatcagagcatgcatcaggggtccacacaggctcagctctctccaccacccagctcttccctgaccttcacgaagggatggctctccagtccttgggtcccgtagcacacagttacagtgtcctaagatactgctatcattcttcgctaatttgtatttgtattcccttccccctacaagattatgagaccccagagggggaaggtctgggtcaaattcttcttttgtatgtccagtctcctgcacagcacctgcagcattgtaactgcttaataaatgacatctcactgaacgaatgagtgctgtgtaagtgatggagatacctgaggctattgctcaagcccaggccttggacatttagtgactgttagccggtccctttcagatccagtggccatgccccctgcttcccatggttcactgtcattgtgtttcccagcctctccactcccccgccagaaaggagcctgagtgattctcttttcttcttgtttccctgattatgatgagcttccattgttctgttaagtcttgaagaggaatttaataaagcaaagaaactttttaaaaacgtagc

SEQ ID NO: 385 - DNA, 2024 bp, Homo sapiens
  modified_base (7): a, t, c, g, other or unknown
gactgcngcggctgcgcggaggagcgaggcacttgctggggtcggggctgcgcgacggcgcaggggctgcggggagcgccgcgcaggccgtgcagttcctagcgaggaggcgccgccgccattgccgctctctgcggtgagcgcagccccgctctccgggccgggccttcgcgggccaccggcgccatgggccagtgcggcatcacctcctccaagaccgtgctggtctttctcaacctcatcttctggggggcagctggcattttatgctatgtgggagcctatgtcttcatcacttatgatgactatgaccacttctttgaagatgtgtacacgctcatccctgctgtagtgatcatagctgtaggagccctgcttttcatcattgggctaattgggctgctgtgccacaatccgggaaagtcgctgtggacttgccacgtttgtcatcatcctgctcttggtttttgtcacagaagttgttgtagtggttttgggatatgtttacagagcaaaggtggaaaatgaggttgatcgcagcattcagaaagtgtataagacctacaatggaaccaaccctgatgctgctagccgggctattgattatgtacagagacagctgcattgttgtggaattcacaactactcagactgggaaaatacagattggttcaaagaaaccaaaaaccagagtgtccctcttagctgctgcagagagactgccagcaattgtaatggcagcctggcccacccttccgacctctatgctgaggggtgtgaggctctagttgtgaagaagctacaagaaatcatgatgcatgtgatctgggccgcactggcatttgcagctattcagctgctgggcatgctgtgtgcttgcatcgtgttgtgcagaaggagtagagatcctgcttacgagctcctcatcactggcggaacctatgcatagttgacaactcaagcctgagctttttggtcttgttctgatttggaaggtgaattgagcaggtctgctgctgttggcctctggagttcatttagttaaagcacatgtacactggtgttggacagagcagcttggcttttcatgtgcccacctacttacctactacctgcgactttctttttccttgttctagctgactcttcatgcccctaagattttaagtacgatggtgaacgttctaatttcagaaccaattgcgagtcatgtagtgtggtagaattaaaggaggacacgagcctgcttctgttacctccaagtggtaacaggactgatgccgaaatgtcaccaggtcctttcagtcttcacagtggagaactcttggccaaaggtttttggggggaggaggaggaaaccagctttctggttaaggttaacaccagatggtgcccctcattggtgtccttttaaaaaatatttactgtagtccaataagatagcagctgtacaaaatgactaaaatagattgtaggatcatatggcgtatatcttggttcatcttcaaaatcagagactgagctttgaaactagtggtttttaatcaaagttggctttataggaggagtataatgtatgcactactgttttaaaagaattagtgtgagtgtgtttttgtatgaatgagcccattcatggtaagtcttaagcttgttggaaataatgtacccatgtagactagcaaaatagtatgtagatgtgatctcagttgtaaatagaaaaatctaattcaataaactctgtatcagcccccaacatattatttttcattatttgggggatatttcagttccagagcagcagtatcatgttttctttgttggtgctgtctatagttcatcatggtttacgtgtgttttcgttatagctgttgccagattctaaagggcttgatattcaaaaaaccacagatgctttcagtccagtatatcctagaaatatagagctctactttgtgcaatgcactggggatacagtggcgatactgtccttgtcttcaaggagttcggagtcctagtatagg

SEQ ID NO: 386 - DNA, 1259 bp, Homo sapiens
gcactttatgcttccccagaggtgactaaactctgatcattgccaatgggcaggcactccccaaatgtccaaggacaacaaagatacccagagtgtctttcatagctaccaatgattaaatagcaagtattgcattcctgggcattgctaactagtgaagtataccagatggaaatgtcttcgaagctgtccctttaaaactcgagcaagctaccaggcaaactccgcctccagggaggttccttattaaataggagccaactggctgggtcggggctcaataccccaagcaatacctgcaactgaggattcttcccggggagaccgcagcccatcggcatggctcaagagtttgtgaactgcaaaatccagcctgggaaggtggttgtgttcatcaagcccacctgccccgtactgcaggagggcccaagagatcctcagtcaattgcccatcaaacaagggcttctggaatttgtcgatatcacagccaccaaccacactaacgagattcaagattatttgcaacagctcacgggagcaagaacggtgcctcgagtctttatcggtaaagattgtataggcggatgcagtgatctagtctctttgcaacagagtggggaactgctgacgcggctaaagcagattggagctctgcagtaaccacagatctcataggaaatgttcaacaattctgtgaaaggtcacaggacccaattggagaaatcatatgaaaagcatagttggtcttggtgtcatatggatcagaggcacaagtgcagaggctgtggtcatgcggaacactctgttatttaagatggctatccagataatcctgaacactgtgtatttattttatttagactaccagcaaagattaaagcatgaaatgtaaaacatctgataaaacttacagccccctacaccaagagtgtatctgtgaaagagctcctacactttgaaaacttaagaatcccttatcatgaagtttgcctgttctagaattgtaagattgttaatttccttcaatctctagtgacaacacttaatttcttttctaataaaaaaaacctatagatgattcagtgatttttgtccaattcatttgcatgttctcaagacattaaggaatgttatgcgaaatacactaacttaaaactgtgtttatatttggccctgccattataaataaagacacgtgctgctgtcactcactgagtacaaatggctgatataattttgaagtttcatataaacatga

SEQ ID NO: 387 - DNA, 3772 bp, Homo sapiens
ctcccaacaatggcggctccgagcccgagcggcggcggcggctccgggggcggcagcggcagcggcacccccggccccgtagggtccccggcgccaggccacccggccgtcagcagcatgcagggtaaacgcaaagcactgaagttgaattttgcaaatccacctttcaaatctacagcaaggtttactctgaatcccaatcctacaggagttcaaaacccacacatagagagactgagaacacacagcattgagtcatcaggaaaactgaagatctcccctgaacaacactgggatttcactgcagaggacttgaaagaccttggagaaattggacgaggagcttatggttctgtcaacaaaatggtccacaaaccaagtgggcaaataatggcagttaaaagaattcggtcaacagtggatgaaaaagaacaaaaacaacttcttatggatttggatgtagtaatgcggagtagtgattgcccatacattgttcagttttatggtgcactcttcagagagggtgactgttggatctgtatggaactcatgtctacctcgtttgataagttttacaaatatgtatatagtgtattagatgatgttattccagaagaaattttaggcaaaatcactttagcaactgtgaaagcactaaaccacttaaaagaaaacttgaaaattattcacagagatatcaaaccttccaatattcttctggacagaagtggaaatattaagctctgtgacttcggcatcagtggacagcttgtggactctattgccaagacaagagatgctggctgtaggccatacatggcacctgaaagaatagacccaagcgcatcacgacaaggatatgatgtccgctctgatgtctggagtttggggatcacattgtatgagttggccacaggccgatttccttatccaaagtggaatagtgtatttgatcaactaacacaagtcgtgaaaggagatcctccgcagctgagtaattctgaggaaagggaattctccccgagtttcatcaactttgtcaacttgtgccttacgaaggatgaatccaaaaggccaaagtataaagagcttctgaaacatccctttattttgatgtatgaagaacgtgccgttgaggtcgcatgctatgtttgtaaaatcctggatcaaatgccagctactcccagctctcccatgtatgtcgattgatatcgctgctacatcagactctagaaaaaagggctgagaggaagcaagacgtaaagaattttcatcccgtatcacagtgtttttattgctcgcccagacaccatgtgcaataagattggtgttcgtttccatcatgtctgtatactcctgtcacctagaacgtgcatccttgtaatacctgattgatcacacagtgttagtgctggtcagagagacctcatcctgctcttttgtgatgaacatattcatgaaatgtggaagtcagtacgatcaagttgttgactgtgattagatcacatcttaaattcatttctagactcaaaacctggagatgcagctactggaatggtgttttgtcagacttccaaatcctggaaggacacagtgatgaatgtactatgtctgaacatagaaactcgggcttgagtgagaagagcttgcacagccaacgagacacattgccttctggagctgggagacaaaggaggaatttactttcttcaccaagtgcaatagattactgatgtgatattctgttgctttacagttacagttgatgtttggggatcgatgtgctcagccaaatttcctgtttgaaatatcatgttaaattagaatgaatttatctttaccaaaaaccatgttgcgttcaaagaggtgaacattaaaatatagagacaggacagaatgtgttcttttctcctttaccagtcctatttttcaatgggaagactcaggagtctgccacttgtcaaagaaggtgctgatcctaagaatttttcattctcagaattcggtgtgctgccaacttgatgttccacctgccacaaaccaccaggactgaaagaagaaaacagtacagaaggcaaagtttacagatgtttttaattctagtattttatctggaacaacttgtagcagctatatatttccccttggtcccaagcctgatactttagccatcataactcactaacagggagaagtagctagtagcaatgtgccttgattgattagataaagatttctagtaggcagcaaaagaccaaatctcagttgtttgcttcttgccatcactggtccaggtcttcagtttccgaatctctttcccttcccctgtggtctattgtcgctatgtgacttgcgcttaatccaatattttgccttttttctatatcaaaaaacctttacagttagcagggatgttccttaccaaggatttttagccccaaatctctcatattcgctagtgtttaaaaggctaagaatagtggggcccagccgatgtggtaggtgataaagaggcatcttttctagagacacattggaccagatgaggatccgaaacggcagcctttacgttcatcacctgctagaacctctcgtagtccatcaccatttcttggcattggaattctactggaaaaaaatacaaaaagcaaaacaaaaccctcagcactgttacaagaggccatttaagtatcttgtgcttcttcacttacccattagccaggttctcattaggttttgcttgggcctccctggcactgaaccttaggctttgtatgacagtgaagcagcactgtgagtggttcaagcacactggaatataaaacagtcatggcctgagatgcaggtgatgccattacagaaccaaatcgtggcacgtattgctgtgtctcctctcagagtgacagtcataaatactgtcaaacaataaagggagaatggtgctgtttaaagtcacatccctgtaaattgcagaattcaaaagtgattatctctttgatctacttgcctcatttccctatcttctcccccacggtatcctaaactttagacttcccactgttctgaaaggagacattgctctatgtctgccttcgaccacagcaagccatcatcctccattgctcccggggactcaagaggaatctgtttctctgctgtcaacttcccatctggctcagcatagggtcactttgccattatgcaaatggagataaaagcaattctgactgtccaggagctaatctgaccgttctattgtgtggatgaccacataagaaggcaattttagtgtattaatcatagattattataaactataaacttaagggcaaggagtttattacaatgtatctttattaaaacaaaagggtgtatagtgttcacaaactgtgaaaatagtgtaagaactgtacattgtgagctctggttatttttctcttgtaccatagaaaaatgtataaaaattatcaaaaagctaatgtgcagggatattgccttatttgtctgtaaaaaatggagctcagtaacataactgcttcttggagctttggaatattttatcctgtattcttgtttgaattcctcctctatttaagatatatacatggaatcgaagtgtttatgtaatagttctatccttttgcctgcaggtcagttgtaataaatctaggatgtgatgatgactttgtaatttgattttctgaaatcagaccctgagaggggaaaatcttaaagtaaattacattaaattatctgtgcatttcacaccagg

SEQ ID NO: 388 - DNA, 466 bp, Homo sapiens
  modified_base (444): a, t, c, g, other or unknown
ctcattgttttggacagtctcaaacagcactatttcattgacagagatggacagatgttcagatatatcttgaattttctacgaacatccaaactcctcattcctgatgatttcaaggactacactttgttatatgaagaggcaaaatattttcagcttcagcccatgttgttggagatggaaagatggaagcaggacagagaaactggtcgattttcaaggccctgtgagtgcctcgtcgtgcgtgtggccccagacctcggagaaaggatcacgctaagcggtgacaaatccttgatagaagaagtatttccagagatcggcgacgtgatgtgtaactctgtcaatgcaggctggaatcacgactcgacgcacgtcatcaggtttccactaaatggctactgtcacctcaactcagtccaggtcctctagaggttgcagcanagaggatttgaaatcgtgggct

SEQ ID NO: 389 - DNA, 3148 bp, Homo sapiens
aacttctcgggaagatgaggcagtttggcatctgtggccgagttgctgttgccgggtgatagttggagcggagacttagcataatggcagaacctgtttctccactgaagcactttgtgctggctaagaaggcgattactgcagtctttgaccagttactggagtttgttactgaaggatcacattttgttgaagcaacatataagaatccggaacttgatcgaatagccactgaagatgatctggtagaaatgcaaggatataaagacaagctttccatcattggtgaggtgctatctcggagacacatgaaggtggcattttttggcaggacaagcagtgggaagagctctgttatcaatgcaatgttgtgggataaagttctccctagtgggattggccatataaccaattgcttcctaagtgttgaaggaactgatggagataaagcctatcttatgacagaaggatcagatgaaaaaaagagtgtgaagacagttaatcaactggcccatgcccttcacatggacaaagatttgaaagctggctgtcttgtacgtgtgttttggccaaaagcaaaatgtgccctcttgagagatgacctggtgttagtagacagtccaggcacagatgtcactacagagctggatagctggattgataagttttgcctagatgctgatgtctttgttttggtcgcaaactctgaatcaacactaatgaatacggaaaaacacttttttcacaaggtgaatgagcggctttccaagcctaatattttcattctcaataatcgttgggatgcctctgcatcagagccagaatatatggaagacgtacgcagacagcacatggaaagatgcctgcatttcttggtggaggagctcaaagttgtaaatgctttagaagcacagaatcgtatcttctttgtttcagcaaaggaagttcttagtgctagaaagcaaaaagcacaggggatgccagaaagtggtgtggcacttgctgaaggatttcatgcaagattacaggaatttcagaattttgaacaaatctttgaggagtgtatctcgcagtcagcagtgaaaacaaagttcgaacagcacactatcagagctaaacagatactagctactgtgaaaaacataatggattcagtaaacctggcagctgaagataaaaggtttcatgtgcaatgacagatgaaatttgtcgactgtctgttttggttgatgaattttgttcagagtttcatcctaatccagatgtattaaaaatatataaaagtgaattaaataagcacatagaggatggtatgggaagaaatttggctgatcgatgcaccgatgaagtaaacgccttagtgcttcagacccagcaagaaattattgaaaatttgaagccattacttccagctggtatacaggataaactacatacactgatcccttgcaagaaatttgatctcagttataatctaaattaccacaagttatgttcagattttcaagaggatattgtatttcgtttttccctgggctggtcttcccttgtacatcgatttttgggccctagaaatgctcaaagggtgctcctaggattatcagagcctatctttcagctccctagatctttagcttctactcccactgctcctaccactccagcaacgccagataatgcatcacaggaagaactcatgattacattagtaacaggattggcgtccgttacatctagaacttctatgggcatcattattgttggaggagtgatttggaaaactataggctggaaactcctatctgtttcattaactatgtatggagctttgtatctttatgaaagactgagctggaccacccatgccaaggagcgagcctttaaacagcagtttgtaaactatgcaactgaaaaactgaggatgattgttagctccacgagtgcaaactgcagtcaccaagtaaaacaacaaatagctaccacttttgctcgcctgtgccaacaagttgatattactcaaaaacagctggaagaagaaattgctagattacccaaagaaatagatcagttggagaaaatacaaaacaattcaaagctcttaagaaataaagctgttcaacttgaaaatgagctggagaattttactaagcagtttctaccttcaagcaatgaagaatcctaacaatagagattgctttggtgaccatgataggaggaaacgaaacttgtaagattggaacagttgttatttttatgaaattactttaaatatgaattgtactaactgtacctaaatagcaaagccctgtgtagattctggtaatgatctgtctcagggtatgtgtatttttgaagagtgttatgtccttagttttaattttgagtaaagaaaaggctaaaatcatgaattagttacaagcaacagtaccaacttatgtgacccctgaggggtggggctgtgagctcttaatttgtttttgattctgaaaaactctgcttcctggcatccaggagttagagattgagcctttcatcttctttctcaaaactagtttttgatgctttctttcatgggaatagtcacttttttatttagtaaatcgcattgctggaaccaccaaggagtgtggaatgtccttgagtgtattatttatgcaagtcacagtcacgttgccatcatggcagctatgtgaaacactaataaatgtgtttttactttttattcccgttaaaactgatgtaaaacaggataaaggcttgttatagtcacttataagtatctgggtctaagtaatttccttagatgtttctaaagaaacattttcagctttgctcccattatgattccaataaggaacgctttcctagtgcaattttaggagtaaagtttgaagagataaaaatagccaaagataggagacgtctgaattttgaatgataaacagtgatgttttaaaaaagctgttgttcttcaggaggcatttgcctaggatattgctggattataccccattggaggcttttaattttatttgtatgaattttccaggatttcattaaaaattattattgtattttttaccttaatgaaagattttgggttcaaatatctttctatattaaaagctgattgagtctgtacatatgt

SEQ ID NO: 390 - DNA, 5338 bp, Homo sapiens
cggacgcgtgggaacgaagccacccattacggtatgatgatgtcaaacgtgatgctgatgctacagttacagcccctgctggcgcagcctctctgattctctctccctctccgcgtccagtgctgggctttttcagacaagtgcatctcctaaccaggtcacatttcagccgcgacccactctccgccagtcaccggaggcagaccgcgggaggagagctgaggacagccgcgtgcgcttcgccagcagcggggtgggaggaaggacattaaaatactgcagaagtcaagacccccccaggtcgaacccagaccacgatgcgcgccccgggctgcgggcggctggtgctgccgctgctgctcctggccgcggcagccctggccgaaggcgacgccaaggggctcaaggagggcgagacccccggcaatttcatggaggacgagcaatggctgtcgtccatctcgcagtacagcggcaagatcaagcactggaaccgcttccgagacgaagtggaggatgactatatcaagagctgggaggacaatcagcaaggagatgaagccctggataccaccaaggacccctgccagaaggtgaagtgcagccgccacaaggtgtgcattgcccagggctaccagcgggccatgtgcatcagtcgcaagaagctggagcacaggatcaagcagccgaccgtgaaactccatggaaacaaagactccatctgcaagccctgccacatggcccagcttgcctctgtctgcggctcagatggccacacttacagctctgtgtgtaagctggagcaacaggcgtgcctgagcagcaagcagctggcggtgcgatgcgagggcccctgcccctgccccacggagcaggctgccacctccaccgccgatggcaaaccagagacttgcaccggtcaggacctggctgacctgggagatcggctgcgggactggttccagctccttcatgagaactccaagcagaatggctcagccagcagtgtagccggcccggccagcgggctggacaagagcctgggggccagctgcaaggactccattggctggatgttctccaagctggacaccagtgctgacctcttcctggaccagacggagctggccgccatcaacctggacaagtacgaggtctgcatccgtcccttcttcaactcctgtgacacctacaaggatggccgggtctctactgctgagtggtgcttctgcttctggagggagaagcccccctgcctggcagagctggagcgcatccagatccaggaggccgccaagaagaagccaggcatcttcatcccgagctgcgacgaggatggctactaccggaagatgcagtgtgaccagagcagcggtgactgctggtgtgtggaccagctgggcctggagctgactggcacgcgcacgcatgggagccccgactgcgatgacatcgtgggcttctcgggggactttggaagcggtgtcggctgggaggatgaggaggagaaggagacggaggaagcaggcgaggaggccgaggaggaggagggcgaggcaggcgaggctgacgacgggggctacatctggtagacgccctcagaagccggctgccggggggggactcaacagcagagctctgagcagcagcaggcaacttcgagaacggatccagaaatgcagtcagaaggaccctgctccacctggggggactgggagtgtgagtgtgcatggcatgtgtgtggcacagatggctgggacgggtgacagtgtgagtgcatgtgtgcatgcatgtgtgtatgtgtagtgtgtgtgtggcatgcgctgacaaatgtgtccttgatccacactgctcctggcagagtgagtaacccaaaggccccttcggcctccttgtagctgttttctttccttttgttgttggttttaaaatacattcacacacaaatacaaattgacaggtcaaaatccatgaaatgagatcccccagccgtgtcctccagcccagccctgaccccttggtttctaccctggctccccttggtttctaccctggctcaaccgacccctgtctgcccttctccctcctgcttctgaggtcaagctctggcctgcgagcctgtccccattgcaaaggggagggaggggcagggagctgtctaccagctgaggtcctcccaaaactgggccgatgtggtgtgacatccccaccagcctcagatgagacgggccaggacgcccagccacagcaagccctgtccctttgccggatccccaaacactagagaagctctcctaacccaaggcggagaatgaaggtggtggcggcagaggaggagggcagcagctgagaggccagggacagggtgcctcgccaagctgtctgaggtctgtcccaggtggcccaggtggtgcaggtagaacagggtgaggagagggggtcggctcagcaggaggaggctgtggctgcagagcctgggggagcttttaggtgttgagatggggcagctctgaatcctagaccctggaatagcctgtcccttttctctgggtctcgtggtggagccatgatctgggctgctctcttggggacactgggtggtggttacacagttgacctctgcctggctcccccttggtgcaactcctgcctccatcccccttgctggggtcccctcatccacttgagggcgcctgagggccaggagcagcaggcaaggagcctgggtctaggctaagggggtgtgtgcccacctcctccctgacccttaacactcctgtcctgcccagaccaacagagagagctgtccctgagaccccggagagaagcagctgccgaaagctgcagcctttccgcactctgagaccatgatcttcctcctgccaggggagagccacccacaggccatgtccagccccacttccctcagcccccagggcttccttctggcccctctgaggattccctagggctgccccgcagaggggcttccccaagctctgttttgaagcctgcaatgtggaaaagtgagaagtcagagggaacaggacaggtgcagccgggctctgaggccacacctcacacctcgctgttccccaacatcccctgagcagtgtgagctcatctcaccagatgagaagaggccctgtgcatttcttttgtttgtttgttgctgttttcccccacccatccagttctcctcagcaaagcaaattccttaacacctttggtggagaatttcttacccagacttggggctgtgatgcccttcagtgcgtggtgagtgcagcgtgtgtgcgtgtgcctgtgtgtgaacctgggggccatcctggtggcctgggagcgtgaggagaggccccctgtgtgctgggtgagtggtgggtgtggggtcaatgcagtgaggctctctgggtgaggctcccaacctggcagtccccagcctcccagcatctgtgagcgtctgttggactttacagaagagcctcatcccgtctgcccctcactctgccctggaatcaacatcttccgagtccttcttgggggaaatagcagagccccacttaactccataaactgcttcccattccgcagcccagttctgattgttgaggtgtcgcgtcgttccaggtcccccagtcccctctttctcctgtcctctctctgtccttcacctccccactccagccccggctcagttcagggaaatgctgttccatatcagccctctgctctctgaggcagccgcgcctctgactcggagctacttgaaacttctgctcttgctaggattggagtctacctatctcttccatttgtcccagctggagttctggaactttcctcctcggggtgggggtgggggttgttaaggatgctggggggcctggggaaggaaggagttcagaggaagggtgtcccctgtcctcttgatgtcaccctccgctcctgggacacgtgctctctctgtctctgggtcttctggctgtgcacgtttgtgtgtccttgtaaatatgttttaggaagaaagcaaaagggactgaactagcctctggtaggattgcaggggtccagccttgcctgtttccgaagcccccacactgcctttcgccccactgagactggtcccctcaaaaggtagacaaaacagcagctccctgtggagctgaagggcggcctcaaagtggctttttgttagacaaggttaaggtttcctcatgagcaaggttgcagatcggtccttcctcagctccttgatttgtgaccttgaccaaggggcctgccacccagcccctccagtgccctctcctcgatgcctcgctccttcctgcccccactcccctggcttaggcaggtaggggaattagggccatgctggaagaagcttaaccatgtgttcaaagaacggtttcttgcttgcttggtcctggaactccccttggctgccccaggcctccttggcccatgggtgctgggggaggtggatgtcagatctggtaggttgcagcagagaaaataaatgtgccttgagagaccactcagagagggtccaagggtgatggagaaggaagcatggcctgggagcttggaagggaggggtggtgggtggcggcatcttgactgccccctgttgtccccacacgtggggggtggtcaccccccttcactccagcccgcctgccttcagccttccatgagcttcacctgcttccaacttcactttggagggggtggggtccgttggcatcaacacggggaccctctgcttcaccaaagcccgagccctcagcccctggggagaacaaatggctgagctttgatacctggggtcgtcgagaggctgcgggctggcggcagtcccaggggagagacaccacagaaggagacccagacatcccgaggaagttcccagcagagcaaactgctttccagcctgaagcctgcttaaactgtgtgatgtgcaataactgagcttagagttaggaattgtgttcaagtgcttggatttccgtctgtagatttaactgctgaaattgtatctctcagtaattttagatgtcttttaaaaaattgaaaaacaaagtgttagactgtgtgcgtgtgcgttgatgggcactcaagagtcccgtgagtcatccagccctgcctttcccctgcgcccccatcctctcacgtcccgccccgcctccacttggggaccctgcctcgtgtcgtctttatctgcctattactcagcctaaggaaacaagtacactccacacatgcataaaggaaatcaaatgttatttttaagaaaatggaaaataaaaactttataaacaccaaaaaaaaaataaagggg

SEQ ID NO: 391 - DNA, 3218 bp, Homo sapiens
ctcccggagatgccccgcggcagccgcgctcggggctctaagagaaaaaggagttggaatacagaatgcccatcctttccaggagaaagaccactgcaggtcagaagagcaggtctcaggacagcaggggcagctgcctctctctctgaagcatggctcaggtgtggagaagggtttcagaacacttctgggaatccgtcattaacagctgaagagaagacgattacagaaaagcaccttgaattatgccctagacccaagcaagaaaccaccacatctaaaagcaccagtgggcttacagacataacatggagctccagtggaagtgatttgtcggatgaagataagacactttctcagttacagagagatgaattacagtttatcgactgggagattgacagtgacagggcagaggctagtgactgtgatgaatttgaagatgacgagggtgctgtggaaatctcagactgtgcttcttgtgcaagtaatcagtctttgacaagtgatgagaagctgtcggagcttcccaagccaagttctatagaaattttagagtattcatcagatagtgaaaaagaagatgatttggaaaatgtcctactcattgattcagaatcccctcacaaataccacgtgcagtttgcatcggatgcaagacagattatggagagactgatagatccaaggacaaaatcaacagagaccattttgcatacacctcagaaacccacagctaagtttcccaggactccagaaaattcagcaaagaagaagcttttaagaggtggactagcagaaagactaaatggactgcagaatcgagagagatctgctatttctttgtggagacatcaatgtatttcttaccaaaagacactttcaggtagaaaatctggtgtattaactgtgaaaattttagagctgcatgaggaatgtgccatgcaagttgccatgtgtgagcagttattggggtcaccagccaccagctcctcccaaagtgtggctcccaggcctggagctggcctgaaagttctcttcaccaaggagactgcaggctacctcaggggccgtccccaggacactgtccggatcttccctccctggcaaaaactgattattccaagtggaagttgccctgttattctgaatacttacttttgtgagaaagttgttgccaaagaagattcagaaaaaacttgtgaagtgtactgtccggacataccccttccaagaagaagcatctctttggcccagatgtttgtaattaagggtctaacaaataattcacctgaaatccaggttgtgtgtagtggtgtagccactacagggacagcctggacccatgggcacaaagaagcaaaacagcgcatcccaaccagcactcccctgagggattctctcctggatgtggtggaaagccagggagctgcctcgtggccaggagctggagtccgagtggtggtgcaaagagtgtattctcttcccagcagagacagcaccaggggtcagcagggggccagctcaggacacacagacccagctggaactcgagcctgccttctggtacaagatgcctgtggaatgttcggtgaagtgcacttggagttcaccatgtcgaaggcaagacagttggaagggaagtcttgcagcctggtgggaatgaaggttctacagaaagtcaccagaggaaggacagcggggattttcagtttgattgacaccctgtggcccccagcgatacctctgaaaacacctggccgcgaccagccctgtgaagagataaaaactcatctgcctcctccagccttgtgttacatcctcacagctcatccaaatctgggacaaattgatataattgacgaagaccccatttataagctttaccagcctccagttacccgctgcttaagagacattctccagatgaatgatcttggtacccgttgcagtttctatgccacggtgatttaccaaaaaccacagctgaagagtctgctgcttctggagcaaagggagatctggctgctagtgaccgatgtcactctgcaaacgaaggaggagagagaccccaggctccccaaaaccctgctggtctatgtggcccccttgtgtgtgctgggctctgaagtcctggaggcactcgctggggctgcccctcacagcctcttcttcaaggacgctctccgtgaccagggtcggattgtttgtgctgaacgaactgtcctcttgcttcagaagccccttttgagtgtggtctctggtgcaagttcctgtgagctgcctggcccggtgatgctcgacagcctggactctgcaacacctgtcaactccatctgcagtgttcaaggcactgtggttggcgtggacgagagcactgctttctcatggcctgtgtgtgacatgtgtggcaacgggagattggaacagaggccggaagacagaggcgccttttcctgtggggactgctcccgggtggtcacatctcctgttctcaagaggcacctgcaggtcttcctggactgccgctcaagaccgcagtgcagagtgaaggtcaagctgttgcagcgcagcatttcctccctgctgaggtttgccgccggtgaagatgggagctacgaagtgaagagtgtcctcggaaaggaagtggggttgttaaattgttttgtccagtccgtaaccgcccacccgaccagctgcattggattggaggaaatcgagcttctgagtgcaggaggggcctctgcagaacactagcggttgccgcaggatctgtgaactttgcaatgtggctgcaagggtggtggtggtggtggtgatttggggtagttatttgttaactatggacacagtgaacgtagtttacgatcttgaaatgaaacttagatttttctggggaaatgttcagatacagttttgtgaactgtaaatcaaaatacctttttctacagtttatcttttattttctgcaaatttaggaacatatttactcgttttcacattgaatcttaagtttaagctcttcatttggtatttaggcaatatatgagaaaaaaattttttttgttcatttgtaattttaacaagttgaacattttaccatgattgaacatgtttttattacagtatttaacattcccccaaagaataccctgcaaagtgtaaacctttgtcccatactgtgatattactgttctgctacaataaatgtcaaacct

SEQ ID NO: 392 - DNA, 2512 bp, Homo sapiens
ctgttagtgactaatcattggagacaaccatgtttagtatttgagcattggttaaatgctaaagaaaaatcgccgttaaagcagttttctttttcactgtctttttcttttcgcggggaacccagctgttcctgcgagggccacctcctcaggaagaccccgcagctctcccgcggcgcttctgcaggaggcagcgacagtttcgagaacccgggccttcccctcccagtgcctcccggggttccggcgtttcaggcgctgctgttttccgggaagggcaggcgcgctgggccttggggagctgcgctcggcgggcggacgcgggggatcatggaagctgataaagatgacacacaacaaattcttaaggagcattcgccagatgaatttataaaagatgaacaaaataagggactaattgatgaaattacaaagaaaaatattcaactaaagaaggagatccaaaagcttgaaacggagttacaagaggctaccaaagaattccagattaaagaggatattcctgaaacaaagatgaaattcttatcagttgaaactcctgagaatgacagccagttgtcaaatatctcctgttcgtttcaagtgagctcgaaagttccttatgagatacaaaaaggacaagcacttatcacctttgaaaaagaagaagttgctcaaaatgtggtaagcatgagtaaacatcatgtacagataaaagatgtaaatctggaggttacggccaagccagttccattaaattcaggagtcagattccaggtttatgtagaagtttctaaaatgaaaatcaatgttactgaaattcctgacacattgcgtgaagatcaaatgagagacaaactagagctgagcttttcaaagtcccgaaatggaggcggagaggtggaccgcgtggactatgacagacagtccgggagtgcagtcatcacgtttgtggagattggagtggctgacaagattttgaaaaagaaagaataccctctttatataaatcaaacctgccatagagttactgtttctccatacacagaaatacacttgaaaaagtatcagatattttcaggaacatctaagaggacagtgcttctgacaggaatggaaggcattcaaatggatgaagaaattgtggaggatttaattaacattcactttcaacgggcaaagaatggaggtggagaagtagatgtggtcaagtgttctctaggtcaacctcacatagcatactttgaagaatagacttaacagaatcatgaaaactatagctttttaacccggattactgtaaatgtttgacaaaaatgaatatgcttttccttaaaaaatgaaaactttaatttttaccatccatttatgtttagatacaaaacttatttccatgtttctgaatcttctttgtttcaaatggtgctgcatgttttcaactacaataagtgcactgtaataaagaagattcagaaacatggaaataagttttgtatctaaacataaatggatggtaaaaattaaagttttcattttttaaggaaaagcatattcatttttgtcaaacatttacagtaatccgggttaaaaagctatagttttcatgattctgttaagtctattcttcaaagtatgctatgtgaggttgacctagagaacacttgaccacatctacttctccacctccattctttgcccgttgaaagtgaatgttaattaaatcctccacaatttcttcatccatttgaatgccttccattcctgtcagaagcactgtcctcttagatgttcctgaaaatatctaagaaggaaaaaatgataaatagaaagatttctaagagctttgaattacaaaactttacattcataatctctgcttaatattttttattttatcttagaagagacaagaaatcttaggaagattttccaagcaagagaatatccaagtcagatctgagttttagaaagagaactctggtggcattatggaacacagaggaaaggagggatgctctgggaacagaaagaccaggtaaagaggtagtcagaagtggagctggcaagatttagtgaccaaatgaatgttggaggtgaagcaaactgaagatttaagtatgagttctagcttttaagttggtggagtaggtagatggtggtaccattggatacctgagaaggaagaggaaaagggagcaggtctcgggtaaagataatgagttcagagaaagtaggcaggaattctttctcatgctcactgacagtagacatatgagagaaatgcaactatgtctccatgtacaaaaataaaaattgtgccattatctgagtaatttcagttttaaaaattgtataataaagtacagttttgcattaaaatgctccttcaaaagacaaactcattttgcaccaagcaaaaatgaagtaaagaaaccattttgctatccctcattgataagatgcataagtaacagactcacaacaactttattttttgtggggtgggtttggg

SEQ ID NO: 393 - DNA, 1281 bp, Homo sapiens
gcgcctgcgcgctcagcggccgggcgtgtaacccacgggtgcgcgcccacgaccgccagactcgagcagtctctggaacacgctgcggggctcccgggcctgagccaggtctgttctccacgcaggtgttccgcgcgccccgttcagccatgtcgtccggcatccatgtagcgctggtgactggaggcaacaagggcatcggcttggccatcgtgcgcgacctgtgccggctgttctcgggggacgtggtgctcacggcgcgggacgtgacgcggggccaggcggccgtacagcagctgcaggcggagggcctgagcccgcgcttccaccagctggacatcgacgatctgcagagcatccgcgccctgcgcgacttcctgcgcaaggagtacgggggcctggacgtgctggtcaacaacgcgggcatcgccttcaaggttgctgatcccacaccctttcatattcaagctgaagtgacgatgaaaacaaatttctttggtacccgagatgtgtgcacagaattactccctctaataaaaccccaagggagagtggtgaacgtatctagcatcatgagcgtcagagcccttaaaagctgcagcccagagctgcagcagaagttccgcagtgagaccatcactgaggaggagctggtggggctcatgaacaagtttgtggaggatacaaagaagggagtgcaccagaaggagggctggcccagcagcgcatacggggtgacgaagattggcgtcaccgttctgtccaggatccacgccaggaaactgagtgagcagaggaaaggggacaagatcctcctgaatgcctgctgcccagggtgggtgagaactgacatggcgggacccaaggccaccaagagcccagaagaaggtgcagagacccctgtgtacttggcccttttgcccccagatgctgagggtccccatggacaatttgtttcagagaagagagttgaacagtggtgagctgggctcacagctccatccatgggccccattttgtaccttgtcctgagttggtccaaagggcatttacaatgtcataaatatccttatataagaaaaaaaatgatctcttatcaattagcactcactaatgtactactaattgagcaacctacgcactcagttgactacgtaaatctgtcaggtcttttgtgatttcctctgatgcaggagaggaaaaattgtaattgatgaaaataatgaatgaaaatcaacagatgaataaatggttctttataagtaaaaaaaaaaaaaaggg

SEQ ID NO: 394 - DNA, 3607 bp, Homo sapiens
ggggcccagtgcgccgcgctcgcagccggtagcgcgccagccgtaggcgtcgctcggcagccgcggggccctaggcgtgccggggagggggcgagggcggccaggcgcctgccgccccggaggcaggatgagcatcgagatcccggcgggactgacggagctgctgcagggcttcacggtggaggtgctgaggcaccagcccgcggacctgctggagttcgcgctgcagcacttcacccgcctgcagcaggagaacgagcgcaaaggcaccgcgcgcttcggccatgagggcaggacctggggggacctgggcgccgctgccgggggcggcacccccagcaagggggtcaacttcgccgaggagcccatgcagtccgactccgaggacggggaggaggaggaggcggcgcccgcggacgcaggggcgttcaatgctccagtaataaaccgattcacaaggcgtgcctcagtatgtgcagaagcttataatcctgatgaagaagaagatgatgcagagtccaggattatacatccaaaaactgatgatcaaagaaataggttgcaagaggcttgcaaagacatcctgctgtttaagaatctggatccggagcagatgtctcaagtattagatgccatgtttgaaaaattggtcaaagatggggagcatgtaattgatcaaggtgacgatggtgacaacttttatgtaattgatagaggcacatttgatatttatgtgaaatgtgatggtgttggaagatgtgttggtaactatgataatcgtgggagtttcggcgaactggccttaatgtacaatacacccagagcagctacaatcactgctacctctcctggtgctctgtggggtttggacagggtaaccttcaggagaataattgtgaaaaacaatgccaaaaagagaaaaatgtatgaaagctttattgagtcactgccattccttaaatctttggagttttctgaacgcctgaaagtagtagatgtgataggcaccaaagtatacaacgatggagaacaaatcattgctcagggagattcggctgattcttttttcattgtagaatctggagaagtgaaaattactatgaaaagaaagggtaaatcagaagtggaagagaatggtgcagtagaaatcgctcgatgctcgcggggacagtactttggagagcttgccctggtaactaacaaacctcgagcagcttctgcccacgccattgggactgtcaaatgtttagcaatggatgtgcaagcatttgaaaggcttctgggaccttgcatggaaattatgaaaaggaacatcgctacctatgaagaacagttagttgccctgtttggaacaaacatggatattgttgaacccactgcatgaagcaaaagtatggagcaagacctgtagtgacaaaattacacagtagtggttagtccactgaggaatgtgtttgtgtagatgccaagcattttctgtgatttcaggttttttcctttttttacatttacaacgtatcaataaacagtagtgatttaatagtcaataggctttaacatcactttctaaagagtagttcataaaaaaatcaacatactgataaaatgactttgtactccacaaaattatgactgaaaggtttattaaaatgattgtaatatatagaaagtatctgtgtttaagaagataattaaaggatgttatcataggctatatgtgttttacttattcagactgataatcatattagtgactatccccatgtaagagggcacttggcaattaaacatgctacacagcatggcatcacttttttttataactcattaaacacagtaaaattttaatcatttttgttttaaagttttctagcttgataagttatgtgctggccttggcctattggtgaaatggtataaaatatcatatgcagttttaaaactttttatatttttgcaataaagtacattttgactttgttggcataatgtcagtaacatacatattccagtggttttatggacaggcaatttagtcattatgataataaggaaaacagtgttttagatgagagatcattaatgcatttttccctcatcaagcatatatctgcttttttttattttgcaattctctgtattctatgtctttaaaaatttgatcttgacatttaatgtcacaaagttttgttttttttaaaaagtgatttaaacttaagatccgacattttttgtattctttaagattttacacctaaaaaatctctcctatcccaaaaataatgtgggatccttatcagcatgcccacagtttatttctttgttcttcactaggcctgcataatacagtcctatgtagacatctgttcccttgcgtttccgttctttcttaggatggttgccaacccacaatctcattgatcagcagccaatatgggtttgtttggtttttttaattcttaaaaacatcctctagaggaatagaaacaaatttttatgagcataaccctatataaagacaaaatgaatttctgaccttaccatatataccattaggccttgccattgctttaatgtagactcatagttgaaattagtgcagaaagaactcagatgtactagattttcattgttcattgatatgctcagtatgctgccacataagatgaatttaattatattcaaccaaagcaatatactcttacatgatttctaggccccatgacccagtgtctagagacattaattctaaccagttgtttgcttttaaatgagtgatttcattttgggaaacaggtttcaaatgaatatatatacatgggtaaaattactctgtgctagtgtagtcttactagagaatgtttatggtcccacttgtatatgaaaatgtggttagaatgttaattggataatgtatatataagaagttaaagtatgtaaagtataacttcagccacatttttagaacactgtttaacatttttgcaaaaccttcttgtaggaaaagagagctctctacatgaagatgacttgttttatatttcagattttattttaaaagccatgtctgttaaacaagaaaaaacacaaaagaactccagattcctggttcatcattctgtattcttactcactttttcaagttatctattttgttgcataaactaattgttaactattcatggaacagcaaacgcctgtttaataaagaactttgaccaaggctataaatgccacgtacattattttcagtattgttggttatatttaaattttccttacaataaagcacacttttataataaaatacatgaattattgtttttcatacttttttgcttgtttctttaaagttttctgacgtgcataatgcataattcattgaaaagcatgatagcaatgtggcatgtggaagcgaacccccagggcataacatagtaagaaagtatggttctgtatggcaataggtttttaaaattattagctattcatcatgtgtgggagaaataattgtggtgtgttgcagatttatttggccatttagaataaccaaatcaatctggctaactaggaatttatgtgtaaaattatctgattaaaacagctc

SEQ ID NO: 395 - DNA, 6193 bp, Homo sapiens
  modified_base (192)..(210): a, t, c, g, other or unknown
  modified_base (2434)..(2461): a, t, c, g, other or unknown
gaattcccagctctctgctcgctctgctcgcagtcacagacacttgagcacacgcgtacacccagacatcttcgggctgctattggattgactttgaaggttctgtgtgggtcgccgtggctgcatgtttgaatcaggtggagaagcacttcaacgctggacgaagtaaagattattgttgttatttttctnnnnnnnnnnnnnnnnnnntaagaaaggaaaatatcccaaggactaatctgatcgggtcttccttcatcaggaacgaatgcaggaatttgggaactgagctgtgcaagtgctgaagaaggagatttgtttggaggaaacaggaaagagaaagaaaaggaaggaaaaaatacataatttcagggacgagagagagaagaaaaacggggactatggggagaaaaaagattcagattacgaggattatggatgaacgtaacagacaggtgacatttacaaagaggaaatttgggttgatgaagaaggcttatgagctgagcgtgctgtgtgactgtgagattgcgctgatcatcttcaacagcaccaacaagctgttccagtatgccagcaccgacatggacaaagtgcttctcaagtacacggagtacaacgagccgcatgagagccggacaaactcagacatcgtggagacgttgagaaagaagggccttaatggctgtgacagcccagaccccgatgcggacgattccgtaggtcacagccctgagtctgaggacaagtacaggaaaattaacgaagatattgatctaatgatcagcaggcaaagattgtgtgctgttccacctcccaacttcgagatgccagtctccatcccagtgtccagccacaacagtttggtgtacagcaaccctgtcagctcactgggaaaccccaacctattgccactggctcacccttctctgcagaggaatagtatgtctcctggtgtaacacatcgacctccaagtgcaggtaacacaggtggtctgatgggtggagacctcacgtctggtgcaggcaccagtgcagggaacgggtatggcaatccccgaaactcaccaggtctgctggtctcacctggtaacttgaacaagaatatgcaagcaaaatctcctcccccaatgaatttaggaatgaataaccgtaaaccagatctccgagttcttattccaccaggcagcaagaatacgatgccatcagtgtctgaggatgtcgacctgcttttgaatcaaaggataaataactcccagtcggctcagtcattggctaccccagtggtttccgtagcaactcctactttaccaggacaaggaatgggaggatatccatcagccatttcaacaacatatggtaccgagtactctctgagtagtgcagacctgtcatctctgtctgggtttaacaccgccagcgctcttcaccttggttcagtaactggctggcaacagcaacacctacataacatgccaccatctgccctcagtcagttgggagcttgcactagcactcatttatctcagagttcaaatctctccctgccttctactcaaagcctcaacatcaagtcagaacctgtttctcctcctagagaccgtaccaccaccccttcgagatacccacaacacacgcgccacgaggcggggagatctcctgttgacagcttgagcagctgtagcagttcgtacgacgggagcgaccgagaggatcaccggaacgaattccactcccccattggactcaccagaccttcgccggacgaaagggaaagtccctcagtcaagcgcatgcgactttctgaaggatgggcaacatgatcagattattacttactagtttttttttttttcttgcagtgtgtgtgtgtgctataccttaatggggaaggggggtcgatatgcattatatgtgccgtgtgtggaaaaaaaaaaagtcaggtactctgttttgtaaaagtacttttaaattgcctcagtgatacagtataaagataaacagaaatgctgagataagcttagcacttgagttgtacaacagaacacttgtacaaaatagattttaaggctaacttcttttcactgttgtgctcctttgcaaaatgtatgttacaatagatagtgtcatgttgcaggttcaacgttatttacatgtaaatagacaaaaggaaacatttgccaaaagcggcagatctttactgaaagagagagcagctgttatgcaacatatagaaaaatgtatagatgcttggacagacccggtaatgggtggccattggtaaatgttaggaacacaccaggtcacctgacatcccaagaatgctcacaaacctgcaggcatatcattggcgtatggcactcattaaaaaggatcagagaccattaaaagaggaccatacctattaaaaaaaaatgtggagttggagggctannnnnnnnnnnnnnnnnnnnnnnnnnnnctgggtctgcatctcttattaaataaaaatataaaaatatgtacattacattttgcttattttcatataaaaggtaagacagagtttgcaaagcatttgtggctttttgtagtttacttaagccaaaatgtgtttttttccccttgatagcttcgctaatattttaaacagtcctgtaaaaaaccaaaaaggactttttgtatagaaagcactaccctaagccatgaagaactccatgctttgctaaccaagataactgttttctctttgtagaagttttgtttttgaaatgtgtatttctaattatataaaatattaagaatcttttaaaaaaatctgtgaaattaacatgcttgtgtatagctttctaatatatataatattatggtaatagcagaagttttgttatcttaatagcgggaggggggtatatttgtgcagttgcacatttgagtaactattttctttctgttttcttttactctgcttacattttataagtttaaggtcagctgtcaaaaggataacctgtggggttagaacatatcacattgcaacaccctaaattgtttttaatacattagcaatctattgggtcaactgacatccattgtatatactagtttctttcatgctatttttattttgttttttgcatttttatcaaatgcagggcccctttctgatctcaccatttcaccatgcatcttggaattcagtaagtgcatatcctaacttgcccatattctaaatcatctggttggttttcagcctagaatttgatacgctttttagaaatatgcccagaatagaaaagctatgttggggcacatgtcctgcaaatatggccctagaaacaagtgatatggaatttacttggtgaataagttataaattcccacagaagaaaaatgtgaaagactgggtgctagacaagaaggaagcaggtaaagggatagttgctttgtcatccgtttttaattattttaactgacccttgacaatcttgtcagcaatataggactgttgaacaatcccggtgtgtcaggacccccaaatgtcacttctgcataaagcatgtatgtcatctattttttcttcaataaagagatttaatagccatttcaagaaatcccataaagaacctctctatgtccctttttttaatttaaaaaaatgactcttgtctaatattcgtctataagggattaattttcagaccctttaataagtgagtgccataagaaagtcaatatatattgtttaaaagatatttcagtctaggaaagattttccttctcttggaatgtgaagatctgtcgattcatctccaatcatatgcattgacatacacagcaaagaagatataggcagtaatatcaacactgctatatcatgtgtaggacatttcttatccattttttctcttttacttgcatagttgctatgtgtttctcattgtaaaaggctgccgctgggtggcagaagccaagagaccttattaactaggctatatttttcttaacttgatctgaaatccacaattagaccacaatgcacctttggttgtatccataaaggatgctagcctgccttgtactaatgttttatatattaaaaaaaaaaatctatcaaccatttcatatatatcccactactcaaggtatccatggaacatgaaagaataacatttatgcagaggaaaaacaaaaacatccctgaaaatatacacactcatacacacacacgcacaggggaataaaataagaaaaccattttcctcaccatagacttgatcccatccttacaacccatccttctaacttgatgtgtataaaatatgcaaacatttcacaaatgttctttgtcatttcaaaatactttagtatatcaatatcagtagataccagtgggtgggaaagggtcattacatgaaaatatgaagaaatagccatattagttttttaacctgcaatttgcctcagcaacaaagaaaaagtgaatttttaatgctgaagataaagtaagctaaagtaccagcagaagccttggctatttatagcagttctgacaatagttttataagaacatgaagagaacagaatcacttgaaaatggatgccagtcatctcttgttcccactactgaattcttataaagtggtggcaagatagggaagggataatctgagaatttttaaaagatgatttaatgagaagaagcacaattttgattgtgatgagtcactttctgtaaacaatcttggtctatctttacccttataccttatctgtaatttaccatttattgtatttgcaaagctagtatggtttttaatcacagtaaatcctttgtattccagactttagggcagagccctgagggagtattattttacataacccgtcctagagtaacattttaggcaacattcttcattgcaagtaaaagatccataagtggcattttacacggctgcgagtattgttatatctaatcctattttaaaagatttttggtaatatgaagcttgaatactggtaacagtgatgcaatatacgcaagctgcacaacctgtatattgtatgcattgctgccgtggaggctgtttatttcaacctttttaaaaattgtgttttttagtaaaatggcttattttttcccaaaggtggaatttagcattttgtaatgatgaatataaaaatacctgtcatccccagatcatttaaaagttaactaaagtgagaatgaaaaaacaaaattccaagacactttttaaaagaatgtctgccctcacacacttttatggatttgtttttcttacatacccatcttttaacttagagatagcattttttgccctctttattttgttgtttgtttctccagagagtaaacgctttgtagttctttctttaaaaaacattttttttaaagaagaagaagccacttgaaccctcaataaaggctgttgcctaagcatggcatacttcatctgttctcatttgtgccatctgccgtgatgtcgtcacttttatggcgttaatttcctgccactacagatcttttgaagattgctggaatactggtgtctgttagaatgcttcagactacagatgtaattaaaggcttttcttaatatgttttaaccaaagatgtggagcaatccaagccacatatcttctacatcaaatttttccattttggttattttcataatctggtattgcattttgccttccctgttcatacctcaaattgattcatacctcagtttaattcagagaggtcagttaagtgacggattctgttgtggtttgaatgcagtaccagtgttctcttcgagcaaagtagacctgggtcactgtaggcataggacttggattgcttcagatggtttgctgtatcatttttcttctttttcttttcctggggacttgtttccattaaatgagagtaattaaaatcgcttgtaaatgagggcatacaagcatttgcaacaaatattcaaatagaggctcacagcggcataagctggactttgtcgccactagatgacaagatgttataactaagttaaaccacatctgtgtatctcaagggacttaattcagctgtctgtagtgaataaaagtgggaaattttcaaaagtttctcctgctggaaataaggtataatttgtattttgcagacaattcagtaaagttactggctttcttagtgaaaaaaaaa

SEQ ID NO: 396 - DNA, 3096 bp, Homo sapiens
catcttgcatcagcctgtggatgtatgcctaccaccgggctccttcaccagcaaagtggaaaaagaagcgtttcacaacaaattcttctttttgggttggggaaacgcagtggattatagctctgttttcttctttccaaaactgtgcacccctggatgaaacctccatcaagggagacctacaagttgcctggggttcagtgctctagaaagttccaaggtttgtggcttgaattattctaaagaagctgaaataattgaagagaagcagaggccagctgtttttgaggatcctgctccacagagaatgctctgcacccgttgatactccagttccaacaccatcttctgagatgatcctgattcccagaatgctcttggtgctgttcctgctgctgcctatcttgagttctgcaaaagctcaggttaatccagctatatgccgctatcctctgggcatgtcaggaggccagattccagatgaggacatcacagcttccagtcagtggtcagagtccacagctgccaaatatggaaggctggactcagaagaaggggatggagcctggtgccctgagattccagtggaacctgatgacctgaaggagtttctgcagattgacttgcacaccctccattttatcactctggtggggacccaggggcgccatgcaggaggtcatggcatcgagtttgcccccatgtacaagatcaattacagtcgggatggcactcgctggatctcttggcggaaccgtcatgggaaacaggtgctggatggaaatagtaacccctatgacattttcctaaaggacttggagccgcccattgtagccagatttgtccggttcattccagtcaccgaccactccatgaatgtgtgtatgagagtggagctttacggctgtgtctggctagatggcttggtgtcttacaatgctccagctgggcagcagtttgtactccctggaggttccatcatttatctgaatgattctgtctatgatggagctgttggatacagcatgacagaagggctaggccaattgaccgatggtgtgtctggcctggacgatttcacccagacccatgaataccacgtgtggcccggctatgactatgtgggctggcggaacgagagtgccaccaatggctacattgagatcatgtttgaatttgaccgcatcaggaatttcactaccatgaaggtccactgcaacaacatgtttgctaaaggtgtgaagatctttaaggaggtacagtgctacttccgctctgaagccagtgagtgggaacctaatgccatttccttcccccttgtcctggatgacgtcaaccccagtgctcggtttgtcacggtgcctctccaccaccgaatggccagtgccatcaagtgtcaataccattttgcagatacctggatgatgttcagtgagatcaccttccaatcagatgctgcaatgtacaacaactctgaagccctgcccacctctcctatggcacccacaacctatgatccaatgcttaaagttgatgacagcaacactcggatcctgattggctgcttggtggccatcatctttatcctcctggccatcattgtcatcatcctctggaggcagttctggcagaaaatgctggagaaggcttctcggaggatgctggatgatgaaatgacagtcagcctttccctgccaagtgattctagcatgttcaacaataaccgctcctcatcacctagtgaacaagggtccaactcgacttacgatcgcatctttccccttcgccctgactaccaggagccatccaggctgatacgaaaactcccagaatttgctccaggggaggaggagtcaggctgcagcggtgttgtgaagccagtccagcccagtggccctgagggggtgccccactatgcagaggctgacatagtgaacctccaaggagtgacaggaggcaacacatactcagtgcctgccgtcaccatggacctgctctcaggaaaagatgtggctgtggaggagttccccaggaaactcctaactttcaaagagaagctgggagaaggacagtttggggaggttcatctctgtgaagtggagggaatggaaaaattcaaagacaaagattttgccctagatgtcagtgccaaccagcctgtcctggtggctgtgaaaatgctccgagcagatgccaacaagaatgccaggaatgattttcttaaggagataaagatcatgtctcggctcaaggacccaaacatcatccatctattatctgtgtgtatcactgatgaccctctctgtatgatcactgaatacatggagaatggagatctcaatcagtttctttcccgccacgagccccctaattcttcctccagcgatgtacgcactgtcagttacaccaatctgaagtttatggctacccaaattgcctctggcatgaagtacctttcctctcttaattttgttcaccgagatctggccacacgaaactgtttagtgggtaagaactacacaatcaagatagctgactttggaatgagcaggaacctgtacagtggtgactattaccggatccagggccgggcagtgctccctatccgctggatgtcttgggagagtatcttgctgggcaagttcactacagcaagtgatgtgtgggcctttggggttactttgtgggagactttcaccttttgtcaagaacagccctattcccagctgtcagatgaacaggttattgagaatactggagagttcttccgagaccaagggaggcagacttacctccctcaaccagccatttgtcctgactctgtgtataagctgatgctcagctgctggagaagagatacgaagaaccgtccctcattccaagaaatccaccttctgctccttcaacaaggcgacgagtgatgctgtcagtgcctggccatgttcctacggctcaggtcctccctacaagacctaccactcacccatgcctatgccactccatctggacatttaatgaaactgagagacagaggcttgtttgctttgccctcttttcctggtcacccccactccctacccctgactcatatatact

SEQ ID NO: 397 - DNA, 1722 bp, Homo sapiens
cggctcgagggcgaacccgggggttcgtttctgctgactccagtgtcccgagaggcgccgcttcttccgctttctcgtcaggctcctgcgccccaggcatgaaccaaggtttctgaactactgggcgggagccaacgtctcttctttctcccgctctggcggaggctttgtcgctgcgggctgggccccagggtgtcccccatggcggggccgcgggtggaggtcgatggcagcatcatggaagggggcggccagatcctgagagtctctacggccttgagctgtctcctaggcctccccttgcgggtgcagaagatccgagccggccggagcacgccaggcctgaggcctcaacatttatctggactggaaatgattcgagatttgtgtgatgggcaactggagggggcagaaattggctcaacagaaataacctttacaccagagaagatcaaaggtggaatccacacagcagataccaagacagcagggagtgtgtgcctcttgatgcaggtctcaatgccgtgtgttctctttgctgcttctccatcagaacttcatttgaaaggtggaactaatgctgaaatggcaccacagatcgattatacagtgatggtcttcaagccaattgttgaaaaatttggtttcatatttaattgtgacattaaaacaagggggatattacccaaaagggggtggtgaagtgattgttcgaatgtcaccagttaaacaattgaaccctataaatttaactgagcgtggctgtgtgactaagatatatggaagagctttcgttgctggtgttttgccatttaaagtagcaaaagatatggcagcggcagcagttagatgcatcagaaaggagatccgggatttgtatgttaacatccagcctgttcaagaacctaaagaccaagcatttggcaatggaaatggaataataattattgctgagacctccactggctgtttgtttgctggatcatcgcttggtaaacgaggtgtaaatgcagacaaagttggaattgaagctgccgaaatgctattagcaaatcttagacatggtggtactgtggatgagtatctgcaagaccagctgattgttttcatggcattagccaatggagtttccagaataaaaacaggaccagttacactccatacgcaaaccgcgatacattttgctgaacaaatagcaaaggctaaatttattgtgaagaaatcagaagatgaagaagacgccgctaaagatacttatattattgaatgccaaggaattgggatgacaaatccaaatctatagagtatttgcctcttaaatgatacctcattgatatattgcactatttcataaatactataaaataatgactaggaagtaacttattaaaggctatgacttaaatttgaagatgaagtacagtgttctaggtttgctgagaaggcttcattaaattaatctcactttgaatatctcctgagagatggacaatgaaatatcagttggtggatatgtgtgatagctgatttcaatattgaagtattgaaataaaatattctttacacctgaagtaaatacatttttcttttttatgtaattaattaaatcagggatatagatttgatctgtaatttgggtataattctaatctttgctgaaatcacatctcaagtataatgaggcaactttatgcaaatgtacttgttgtgacaacaataaca

SEQ ID NO: 398 - DNA, 4839 bp, Homo sapiens
  modified_base (3080)..(3102): a, t, c, g, other or unknown
  modified_base (4828): a, t, c, g, other or unknown
ccagttccggcgaggaggccgcgccagtgacagcgatggcggcggagtcggcgctccaagttgtggagaagctgcaggcgcgcctggccgcgaacccggaccctaagaagctattgaaatatttgaagaaactctccaccctgcctattacagtagacattcttgcggagactggggttgggaaaacagtaaatagcttgcgaaaacacgagcatgttggaagctttgccagggacctagtggcccagtggaagaagctggttcctgtggaacgaaatgctgagcctgatgaacaggactttgagaagagcaattcccgaaagcgccctcgggatgccctgcagaaggaggaggagatggagggggactaccaagaaacctggaaagccacggggagccgatcctatagccctgaccacaggcagaagaaacataggaaactctcggagctcgagagacctcacaaagtgtctcacggtcatgagaggagagatgagagaaagaggtgtcacagaatgtcaccaacttactcttcagaccctgagtcttctgattatggccatgttcaatcccctccatcttgtaccagtcctcatcagatgtacgtcgaccactacagatccctggaggaggaccaggagcccattgtttcacaccagaagcctgggaaaggccacagcaatgcctttcaggacagactcggggccagccaagaacgacacctgggtgaaccccatgggaaaggggttgtgagtcaaaacaaggagcacaaatcttcccacaaggacaaacgccccgtggatgccaagagtgatgagaaggcctctgtggtgagcagagagaaatcacacaaggccctctccaaagaggagaaccgaaggccaccctcaggggacaatgcaagggagaaaccgccctctagtggcgtaaagaaagagaaggacagagagggcagcagcctgaagaagaagtgtttgcctccctcagaggccgcttcagacaaccacctgaaaaagccaaagcacagagacccagagaaagccaaattggacaaaagcaagcaaggtctggacagctttgacacaggaaaaggagcaggagacctgttgcccaaggtaaaagagaagggttctaacaacctaaagactccagaagggaaagtcaaaactaatttggatagaaagtcactgggctccctccctaaagttgaggagacagatatggaggatgaattcgagcagccaaccatgtcttttgaatcctacctcagctatgaccagccccggaagaaaaagaaaaagattgtgaaaacttcagccacggcacttggagataaaggacttaaaaaaaatgactctaaaagcactggtaaaaacttggactcagttcagaaattacccaaggtgaacaaaaccaagtcagagaagccggctggagctgatttagccaagctgagaaaggtgcctgatgtgttgccagtgttgccagacctcccgttacccgcgatacaggccaattaccgtccactgccttccctcgagctgatatcctccttccagccaaagcgaaaagcgttctcttcaccccaggaagaagaagaagctggatttactgggcgcagaatgaattccaagatgcaggtgtattctggttccaagtgtgcctatctccctaaaatgatgaccttgcaccagcaatgcatccgagtacttaaaaacaacatcgattcaatctttgaagtgggaggagtcccatactctgttcttgaacccgttttggagaggtgtacacctgatcagctgtatcgcatagaggaatacaatcatgtattaattgaagaaacagatcaattatggaaagttcattgtcaccgagactttaaggaagaaagacccgaagagtatgagtcgtggcgagagatgtacctgcggcttcaggacgcccgagagcagcggctacgagtactaacaaagaatatccagttcgcacatgccaataagcccaaaggccgacaagcaaagatggcctttgtcaactctgtggccaagccacctcgtgacgtccggaggaggcaggaaaagtttggaacgggaggagcagctgtccctgagaaaatcaagatcaagccagccccgtaccccatgggaagcagccatgcttccgccagtagcatcagctttaaccccagccctgaggagccggcctatgatggcccaagcaccagcagtgcccacttggcaccagtggtcagcagcactgtttcctatgatcctaggaaacccactgtgaagaaaattgccccaatgatggccaagacaattaaagctttcaagaacagattctcccgacgataaactgaggacttgccttggaaatggaatctggggaggcaggaatacaaggacagtgggggttggggaatggaattctacaggagactggagtcttgctttgtggatccttttggtctccgagtcctgcagtctgcaggtgctgcccctgggaacctgcgtgccacagccccgcctccctgcctggagcacactttagaattctgaagatgtgaagcctctgtctcactgaggattttaaaggtcaattatacttttgttgttcattagcatctttgtaaactataagacgtagttttaattaataaatattgcccccagattgtatttatattatcccccaggtttgtttttgttttttgtcctctaccacacatttagccttttatcttccaggtccttattaaaatcagatgaaagcctagtgaaagccagtctcctgccccagctcagctctgtgtggactctggtccagacagaggactgggcatctccagagcctgcacagtacctgctgcacgtagggcaaggaatgagcactagaccgcctgtccccaagggagcctcagtggggcgacagggtgctcggcggactccacctcaggccctccccactgttgctgtgcattcctgtgcaggtgcatctctttcttactaactggtatttattaaggcaggtgctctgtaggtctggagcctttccctcatcctttttgcgagtccccaccnnnnnnnnnnnnnnnnnnnnnnngaggctcactagaggacgcagaaccttgggagattgatttgcacagaactccccacctcccacttttacaatttccagtttctgattgaaaattttagggtttctccccactgcccttccctatctttccttcccctcaacaccatgaaggaaaaacacacacggcagggctttttgtagccctgaaggcaactttagacatttaaaatccagcactttaatctcttgttctctgtgaatcactatgagaagtgaatggttttaaaggctgtaatgctatgttggaaattggtttgttttgccttttattgaaaaggtaagatcatgtgattggaagaacacaactgttggcttgggaagaggactttgctgctgaagtgttttctaccttctgagtgtgtttaaggcaggatttggagggaaggaccagcttagggagagtgtctgagccacagcgtcaggatgggggaaaccacatgggatccatcaagttccagttgaacaggagcaagatcagaacttaggagggcagtgtcagctcccttgttggctgtcaaggaacaccgatctagtagaaacccacttggttgtgacccaggtagaggtagatgccatacatttgagatatgcgtccttaaggaacctgacaagcagactgaagggatggtaagtgtgacagcctgataagttttctcaaagcccaggatacagagccagtgttttctgtaactggagacctcagttaggccaacttcgaattccagagcaacgtaggaagtctattcagcagaaactcgacattgttcagtgtgtattgctgtgcagggtgcctattgtgacaggacacaaatgttactatgttttaatttgctatatttttgaatgggtaaagcattactttacttctcttggttacttgtaccaccattccacccctatccctagcctgccccacaaatctaatattaggaagcctcttaactgaaaccaaatgaacatttgggtcaggtgccagatgtctgctgcctagaatagctttttctaggtgtctaccaccttgaatttatctcttaactgtgtgttcaagtctttgtcattgaaactagtttttcatatcttagattcagttgtgtatgatttaatgtcccttattaggagtctttaggcagggagggaagaaaaaacagatttgttcatagcaatgtcagtatccattttggcacataaagatttttgatgagccctgtttgcatagagccagatgttttcccctcccccaagagtatctacatcagggatgtgacttggtgcgaagaatcaggggaaagaggaaaaacccaatttctaaatgacctccttgcccagcttactaaaatggctgcagagcagacacaggatgaatttgaacctgacacaggatgaatttgaacctttggtctcatttatggaaaaacttgtgcaattttttttctgtgctacactacatacaaatcaccaaattacaaattacccttttgtgatccttggtgtactgagcagtttctttggggctttttctttctgggaagcgggagggaaaggagcaaggtgtcatcctgctcttcatttgtattttggtcccaaaatgtaaatacaattttctatgttacttttttgtggtaactaccgagatgaatattttaattagataagttatatgaaaaggaaaattccatgtctaaataanaaacaaactcc

SEQ ID NO: 399 - DNA, 677 bp, Homo sapiens
cgtcctttcatcctggcgtttgcctgcagcaagatggcggcggtctcaatgtcagtggtactgaggcagacgttgtggcggagaagggcagtggctgtagctgccctttccgtttccagggttccgaccaggtcgttgaggacttccacatggagattggcacaggaccagactcaagacacacaactcataacagttgatgaaaaattggatatcactactttaactggcgttccagaagagcatataaaaactagaaaagtcaggatctttgttcctgctcgcaataacatgcagtctggagtaaacaacacaaagaaatggaagatggagtttgataccagggagcgatgggaaaatcctttgatgggttgggcatcaacggctgatcccttatccaacatggttctaaccttcagtactaaagaagatgcagtttcctttgcagaaaaaaatggatggagctatgacattgaagagaggaaggttccaaaacccaagtccaagtcttatggtgcaaacttttcttggaacaaaagaacaagagtatccacaaaataggttggcactgactatatctctgcttgactgtgaataaagtcagctatgcagtatttatagtccatgtataataaatacatctcttaatctcctaataaattggacctttaaactac

SEQ ID NO: 400 - DNA, 2693 bp, Homo sapiens
  modified_base (1119): a, t, c, g, other or unknown
  modified_base (1127): a, t, c, g, other or unknown
ggggcgccgaggagagcggcgcggcgtgcgcgggcacgaggcgtagtggtctcccctaaggctgaggcggcggcgggcgcgcggcggcggcgggcgtgcgaggctgttgtgctcccggctctcgtgtttcccctcctgagcgggtggaggaggcccaagcggtgctgggcgcgctcccccttcctttccctccggcgtcctctcccggccctctcgcgctgcactgtctctccgacgcaagactgtcccggcccggatatggctcgtggacagcagaaaattcagtctcagcagaaaaatgccaaaaagcaagctggacaaaagaagaaacaaggacatgaccaaaaggctgctgccaaagctgccttaatatatacctgcactgtctgtaggacacaaatgccagaccctaagaccttcaagcagcactttgagagcaagcatcctaagactccacttcctccagaattagctgatgttcaggcataaggttgtttacaggtgaattcatgacacctttgactcttctactgtctcagaccttaggtaacatacctgcagctgcttttctaacaaactgttgatcagcaaaaataaaggggctacagaaacactcatttttatgctgttccctcttgggcttcatgcaaagacaattctgtgtaaatgtacagttgactctgatttggaaatatgaaaatcagtccatccttgttataaaaaatttttttacaattgtaattatattgatgttcatattgtgtaaaataactcatttaataaaatagtactttgatttacgacatcacaggataaatggttttagaaattctgttctaactttccacattatttgccttataaaaatctaatgaattcatcagctagaattgcaagtgcaattcttatatccctttctctgctcagtggcaggttcctcagttaaactagagcagactgattcattaaaattgtgcatacgattttatgggcagctgatgatctaggtgaaaaatgacttatctgctgccttagtatattgcggttatgtgtcattgtacccctctgatcatttcctgtgtttgagttggaatatttaaaattgcagtatgacctggntctaactnccagtcaggtgtaccctgtagataactgatagcttcctaaaagcggttggattgtcagtgagcccttgtgaaaggttaggttctaatgtatatgccgtaatgaaataatcattaagcctattgtttaatgcaaaatatggaacaaatgtgaactggtaaaggtcgatcttgatactatattctttgaaaattcttgaagttctttaatttgaaattgaaacattaatttttgaggtttttggaagttactatttggccatttttacaaatggattttgcattaacaggaagattggaatgacttgtggctggattaattcccagaaccctctccctcctttcttttctaagtgagttgttgattttaggagtttgctttgtgctgttacctaaaatcagagactggtgtacagtatgacttccatctgaacttgaaaagtattaaaatgggtcaatattcacattcttttagatctcaggatgggaaaatgggtttgttcagatggatatggtaaatcttacccaattaaggaaggctaattttagagttcttctaatttgcttgtgtcaactcttaacttgtaaaactgctgttaactcggtttaaatttttaaattaatataatagaaagaacactaaaatacttactggtaactgcttagagccatttatctgatcctgtggattacagaatgcattccctcttctgctgtagcttatcattgctttgttttgtagctctgcatattttgcccaccttgtcttccctgtaagtttaagacgtttccaaggaaaagcttcagggctgatagtttcttagcaattcctattcttatgcccttactttaaaatagtccttttattttgtgtattttatttcctaagtttcagatgtaatatctgttgtttcctaacatgtcgattaccagaacgttagaattttacctaatttcttgtggatattgcagaagttctggttaaatcacaacttaaaagtttttaaaagtgctttgagcatatgtatatgtttagtgacaaatcatataaaaccattcacaagttttggttttttttttttcgtttgttttagtgactaattcaggatgaaagtttttttgttcttgtatttaacccttttttataagcagctgaagacaccatatttaacactatatctcagtgatagggaaatagctgcattgatcttacatgagcataatcatccttatacttcatgaggggattattagtacaatccccattttactgtgtttgagttaaaaaccaaacatccctgtaatttaatttgaagattctttaacagattgcagcaaagttcattataaaactgttatggtgtcttcaaagacttgataaaataacactgagagagaattggtccatttgtatgctgtatttctattacttgccaaaaggaatggggttaagattaaacttgtttccattctcttcacatggatatacatccccatgtttaactgacacactgggggctcagttgtgtgctgtaatgtcttattaaagaagatattaaagaaaaaaaa

SEQ ID NO: 401 - DNA, 573 bp, Homo sapiens
ctgtcctcggagcaggcggagtaaagggacttgagcgagccagttgccggattattctatttcccctccctctctcccgccccgtatctcttttcacccttctcccaccctcgctcgcgtagccatggcggagccgtcggcggccactcagtcccattccatctcctcgtcgtccttcggagccgagccgtccgcgcccggcggcggcgggagcccaggagcctgccccgccctggggacgaagagctgcagctcctcctgtgcggtgcacgatctgattttctggagagatgtgaagaagactgggtttgtctttggcaccacgctgatcatgctgctttccctggcagctttcagtgtcatcagtggggtttcttacctcatcctggctcttctctctgtcaccatcagcttcaggatctacaagtccgtcatccaagctgtacagaagtcagaagaaggccatccattcaaagcctacctggacgtagacattactctgtcctcagaagctttccataattacatgaatgctgccatggggcccatcaacagggccctgaaactcattat

SEQ ID NO: 402 - DNA, 2509 bp, Homo sapiens
  modified_base (2267): a, t, c, g, other or unknown
  modified_base (2275)..(2317): a, t, c, g, other or unknown
cacccaatgcatcacgtaccccactgggccagccctgcagcccaaaacccagggcaacaagcccgttagccccagggatcactggctggcctgagcaacatctcgggagtcctctagcaggcctaagacatgtgaggaggaaaaggaaaaaaagcaaaaagcaagggagaaaagagaaaccgggagaaggcatgagaaagaatttgagacgcaccatgtgggcacggagggggacggggctcagcaatgccatttcagtggcttcccagctctgacccttctacatttgagggcccagccaggagcagatggacagcgatgaggggacattttctggattctgggaggcaagaaaaggacaaatatcttttttggaactaaagcaaattttagaactttacctatggaagtggttctatgtccattctcattcgtggcatgttttgatttgtagcactgagggtggcactcaactctgagcccatacttttggctcctctagtaagatgcactgaaaacttagccagagttaggttgtctccaggccatgatggccttacactgaaaatgtcacattctattttgggtattaatatatagtccagacacttaactcaatttcttggtattattctgttttgcacagttagttgtgaaagaaagctgagaagaatgaaaatgcagtcctgaggagaggagttttctccatatcaaaacgagggctgatggaggaaaaaggtcaataaggtcaagggaaaaccccgtctctataccaaccaaaccaattcaccaacacagttgggacccaaaacacaggaagtcagtcacgtttccttttcatttaatggggattccactatctcacactaatctgaaaggatgtggaagagcattagctggcgcatattaagcactttaagctccttgagtaaaaaggtggtatgtaatttatgcaaggtatttctccagttgggactcaggatattagttaatgagccatcactagaagaaaagcccattttcaactgctttgaaacttgcctggggtctgagcatgatgggaatagggagacagggtaggaaagggcgcctactcttcagggtctaaagatcaagtgggccttggatcgctaagctggctctgtttgatgctatttatgcaagttagggtctatgtatttatgatgtctgcaccttctgcagccagtcagaagctggagaggcaacagtggattgctgcttcttggggagaagagtatgcttccttttatccatgtaatttaactgtagaacctgagctctaagtaaccgaagaatgtatgcctctgttcttatgtgccacatccttgtttaaaggctctctgtatgaagagatgggaccgtcatcagcacattccctagtgagcctactggctccctggcagcggcttttgtggaagactcactagccagaagagaggagtgggacagtcctctccaccaagatctaaatccaaacaaaagcaggctagagccagaagagaggacaaatctttgttcttcctcttctttacatacgcaaaccacctgtgacagctggcaattttataaatcaggtaactggaaggaggttaaacacagaaaaaagaagacctcagtcaattctctacttttttttttttttccaaatcagataatagcccagcaaatagtgataacaaataaaaccttagctattcatgtcttgatttcaataattaattcttaatcattaagagaccataataaatactccttttcaagagaaaagcaaaaccattagaattgttactcagctccttcaaactcaggtttgtagcatacatgagtccatccatcagtcaaagaatggttccatctggagtcttaatgtagaaagaaaaatggagacttgtaataatgagctagttacaaagtgcttgttcattaaaatagcactgaaaattgaaacatgaattaactgataatattccaatcatttgccatttatgacaaaaatggttggcactaacaaagaacgagcacttcctttcagagtttctgagataatgtacgtggaacagtctgggtggaatggggctgaaaccatgtgcaagtctgtgtcttgtcagtccaagaagtgacaccgagatgttaattttagggacccgtgccttgtttcctagcccacaagaatgcaaacatcaaacagatactcgctagcctcatttaaattgattaaaggaggagtgcatctttggccgacagtngtgtaacnnnnnnnnnnnnnnnnnnnnnnnnnnnnnnnnnnnnnnnnnnncgtgttttgtgcataactatttaaggaaactggaattttaaagttacttttatacaaaccaagaatatatgctacagatataagacagacatggtttggtcctatatttctagtcatgatgaatgtattttgtataccatcttcatataataaaattaacttccaaaaatgtaaaaaagaaaaaaaaaggga

SEQ ID NO: 403 - DNA, 318 bp, Homo sapiens
  modified_base (258): a, t, c, g, other or unknown
  modified_base (273)..(274): a, t, c, g, other or unknown
  modified_base (283): a, t, c, g, other or unknown
  modified_base (308): a, t, c, g, other or unknown
  modified_base (310): a, t, c, g, other or unknown
catctgctgagcgaccggtcttcacgaatcattttcttgtggagttgcataaagggggagaggacaaagctcgccaagttgcagcagaacacggctttggagtccgaaagcttccctttgctgaaggtctgtaccacttttatcacaatggccttgcaaaggcaagtagaagacgcagcctacaccacaagcagcagctggagagagaccccagggtaaagatggctttgcagcaggaaggatttgacccgaaaaaangcgaggttacagagnncatcaatgngatcggacatcaaccatgaaacgancnctcttttt

SEQ ID NO: 404 - DNA, 1125 bp, Homo sapiens
atctggctcagttccgccatggcctccttggaagtcagtcgtagtcctcgcaggtctcggcgggagctggaagtgcgcagtccacgacagaacaaatattcggtgcttttacctacctacaacgagcgcgagaacctgccgctcatcgtgtggctgctggtgaaaagcttctccgagagtggaatcaactatgaaattataatcatagatgatggaagcccagatggaacaagggatgttgctgaacagttggagaagatctatgggtcagacagaattcttctaagaccacgagagaaaaagttgggactaggaactgcatatattcatggaatgaaacatgccacaggaaactacatcattattatggatgctgatctctcacaccatccaaaatttattcctgaatttattagctaatttattctacaggaagcaaaaggagggtaattttgatattgtctctggaactcgctacaaaggaaatggaggtgtatatggctgggatttgaaaagaaaaataatcagaagatctgattgttttatttggcagccgtggggccaattttttaactcagatcttgctgagaccaggagcatctgatttaacaggaagtttcagattataccgaaaagaagttctagagaaattaatagaaaaatgtgtttctaaaggctacgtcttccagatggagatgattgttcgggcaagacagttgaattatactattggcgaggttccaatatcatttgtggatcgtgtttatggtgaatccaagttgggaggaaatgaaatagtatctttcttgaaaggattattgactctttttgctactacataaaagaaagatactcatttatagttacgttcatttcaggttaaacatgaaagaagcctggttactgatttgtataaaatgtactcttaaagtataaaatataaggtaaggtaaatttcatgcatctttttatgaagaccacctattttatatttcaaattaaataattttaaagttgctggcctaatgagcaatgttctcaattttcgttttcattttgctgtattgagacctataaataaatgtatatttttttttgcataaagtattgctgccttaaaaaaaa

SEQ ID NO: 405 - DNA, 2067 bp, Homo sapiens
ggcaaaaagcatgcagaaaaagaagcagacgttttacattgggaattaatgaaagcgtgtctgctagttttgggtaggagaactgggaagttgttgcttaaaattttatatcacctccacaaacaaaactcttcggaaatggtaaaataagaaaatgcatgattctagaggcattcctaagcacccacgtgtcgggctttgtggtgtctgtggtatcatccgaccgtttggactggttagggcttactgagagctccatttctggaaagccttacaagactgaggaatatcagactgcgaatcaccgggaacggttcctttgcagcacagaagcaatctctctccccatcttcgcatattctgatggcaaaacaagtggaagaaaagaggaagcatgactgcagatcagatcagttctctttgtggattatattttcagtaaaatgtatggatctatcttttccttgttcttatatctagatcatgagacttgactgaggctgtatccttatcctccatccatctatggcgaactatagccatgcagctgacaacattttgcaaaatctctcgcctctaacagcctttctgaaactgacttccttgggtttcataataggagtcagcgtggtgggcaacctcctgatctccattttgctagtgaaagataagaccttgcatagagcaccttactacttcctgttggatctttgctgttcagatatcctcagatctgcaatttttttcccatttgtgttcaactctgtcaaaaatggttctacctggacttatgggactctgacttgcaaagtgattgcctttctgggggttttgtcctgtttccacactgctttcatgctcttctgcatcagtgtcaccagatatttagctatcgcccatcaccgcttctatacaaagaggctgaccttttggacgtgtctggctgtgatctgtatggtgtggactctgtctgtggccatggcatttcccccggttttagacgtgggcacttactcattcattagggaggaagatcaatgcaccttccaacaccgctccttcagggctaatgattccttaggatttatgctgcttcttgctctcatcctcctagccacacagcttgtctacctcaagctgatatttttcgtccacgatcgaagaaaaatgaagccagtccagtttgtagcagcagtcagccagaactggacttttcatggtcctggagccagtggccaggcagctgccaattggctagcaggatttggaaggggtcccacaccacccaccttgctgggcatcaggcaaaatgcaaacaccacaggcagaagaaggctattggtcttagacgagttcaaaatggagaaaagaatcagcagaatgttctatataatgacttttctgtttctaaccttgtggggcccctacctggtggcctgttattggagagtttttgcaagagggcctgtagtaccagggggatttctaacagctgctgtctggatgagttttgcccaagcaggaatcaatccttttgtctgcattttctcaaacagggagctgaggcgctgtttcagcacaacccttctttactgcagaaaatccaggttaccaagggaaccttactgtgttatatgagggagcatctgtaaatctttagccttgtgaaaactaaccttctctgctgagcaattgtggcccatagccatattttgagaagaaattcaagaatggaatcagcagttttaaggatttgggcaacattctgcagtctttgcaatagttcacctataatcctattttaaatctcagagtgatcctgctgactgccagcaaaggtttgtaattaagaagggactgaaccactgccctaagtttctttatgtggtcaaaaactagataatgaaagtagcaggtgctaagtatcagtgctaaatgctctgtatgtcactacatatgaaaaaacatcaaaaaacaattagcattggacatcttaataaattaagttgacatgaggtaaatgtgttgataaaaactaattttagaagtttgaagactttaaaacag

SEQ ID NO: 406 - DNA, 554 bp, Homo sapiens
ggtgtccacccagggctccagagcctgcttcctggttcctcaagggcagatattggacactccttatttgtcaccaaaggatgactgtaggccgtgtgctggcctttctttctaagaagctgctttgagctcctggactcacctgaggctccctgggggatgacactcagttctgtcactgtcaaggatgcagagagctggtggtaggtgggaagcatggtgtccacctgcctgctgaccactggacgctgctccatgctgaagaaaagtgacagtctccaggggacatttcagccatgctgaaagggaggctggcagtggtcatttggcccggatctaacatggcacctcgtctccacagggtagtggtggctgcttcaacccaaatattattcagctggtactaacgacattgtgcccagctgggactcttgggctctgtgcctgagggaaaatgtttcacaactagtggctgcccaattgctgctgaccagttgtcttagaaatggtcaattggattcaactttagtcctctccttccccctaaaagcgaa

SEQ ID NO: 407 - DNA, 4178 bp, Homo sapiens
aaacacgggggcagccggcgcttcccggccggtgtcgctccgcggcgggccatggccaacgtctctaagaaggtgtcctggtccggccgggaccgggacgacgaggaggcggcgccgctgctgcggaggacggcgcggcccggcggggggacgccgctgctgaacggggctgggcctggggctgcgcgccagtcaccacgttctgcgcttttccgagtcggacatatgagcagcgtggagctggatgatgaacttttggacccggatatggaccctccacatcccttccccaaggagatcccacacaacgagaagctcctgtccctcaagtatgagagcttggactatgacaacagtgagaaccagctgttcctggaggaggagcggcggatcaatcacacggccttccggacggtggagatcaagcgctgggtcatctgcgccctcattgggatcctcacgggcctcgtggcctgcttcattgacatcgtggtggaaaacctggctggcctcaagtacagggtcatcaagggcaatatcgacaagttcacagagaagggcggactgtccttctccctgttgctgtgggccacgctgaacgccgccttcgtgctcgtgggctctgtgattgtggctttcatagagccggtggctgctggcagcggaatcccccagatcaagtgcttcctcaacggggtgaagatcccccacgtggtgcggctcaagacgttggtgatcaaagtgtccggtgtgatcctgtccgtggtcgggggcctggccgtgggaaaggaagggccgatgatccactcaggttcagtgattgccgccgggatctctcagggaaggtcaacgtcactgaaacgagatttcaagatcttcgagtacttccgcagagacacagagaagcgggacttcgtctccgcaggggctgcggccggagtgtcagcggcgtttggagcccccgtgggtggggtcctgttcagcttggaggagggtgcgtccttctggaaccagttcctgacctggaggatcttctttgcttccatgatctccacgttcaccctgaattttgttctgagcatttaccacgggaacatgtgggacctgtccagcccaggcctcatcaacttcggaaggtttgactcggagaaaatggcctacacgatccacgagatcccggtcttcatcgccatgggcgtggtgggcggtgtgcttggagcagtgttcaatgccttgaactactggctgaccatgtttcgaatcaggtacatccaccggccctgcctgcaggtgattgaggccgtgctggtggccgccgtcacggccacagttgccttcgtgctgatctactcgtcgcgggattgccagcccctgcaggggggctccatgtcctacccgctgcagctcttttgtgcagatggcgagtacaactccatggctgcggccttcttcaacaccccggagaagagcgtggtgagcctcttccacgacccgccaggctcctacaaccccctgaccctcggcctgttcacgctggtctacttcttcctggcctgctggacctacgggctcacggtgtctgccggggtcttcatcccgtccctgctcatcggggctgcctggggccggctctttgggatctccctgtcctacctcacgggggcggcgatctgggcggaccccggcaaatacgccctgatgggagctgctgcccagctgggcgggattgtgcggatgacactgagcctgaccgtcatcatgatggaggccaccagcaacgtgacctacggcttccccatcatgctggtgctcatgaccgccaagatcgtgggcgacgtcttcattgagggcctgtacgacatgcacattcagctgcagagtgtgcccttcctgcactgggaggccccggtcacctcacactcactcactgccagggaggtgatgagcacaccagtgacctgcctgaggcggcgtgagaaggtcggcgtcattgtggacgtgctgagcgacacggcgtccaatcacaacggcttccccgtggtggagcatgccgatgacacccagcctgcccggctccagggcctgatcctgcgctcccagctcatcgttctcctaaagcacaaggtgtttgtggagcggtccaacctgggcctggtacagcggcgcctgaggctgaaggacttccgagacgcctacccgcgcttcccacccatccagtccatccacgtgtcccaggacgagcgggagtgcaccatggacctctccgagttcatgaacccctccccctacacggtgccccaggaggcgtcgctcccacgggtgttcaagctgttccgggccctgggcctgcggcacctggtggtggtggacaaccgcaatcaggttgtcgggttggtgaccaggaaggacctcgccaggtaccgcctgggaaagagaggcttggaggagctctcgctggcccagacgtgaggcccagccctgcccataatgggcactggcgctggcaccccggcccttctgcatttcctcccggagtcactggtttctcggcccaaaccatgctccccagcagtggcaatggcgagcaccctgcagctgggcgggcaggcggcaggcgcggaactgaccctctcgcgggactgaccctgttgtgggcagtggtctccccccttggcgcctccttgcgcaggcccagcctccactctcctcgtctaggtttctttacctccagggatcagctgtgtgtgtgtgacctccctaccgggctatcggcctcttgggagccagcggcagggccggcacctgcgtgcctgtgcccgtgtgcgtgagacagagcccttgcccctgctgctgccccgagggctgccctgccctggaagggcccctctgcctccacaccagtggagtcttcgagacttgggagctgcttggcctcattttcagccatgagcagacggcctgtggtccctgggcctgaggcacggactcgtagcaccagggtttggaggctgcgaccgccccggagagcagcttcacactggcgccacagaggagccccacgtgcactccccggcctgcatccggcttgggtacacaggcccagaggactggggtgactcacgggccctgtgctgtgatgttgagagctgagaaaaacctccaaggccctgagccccatgcccagccctgccttggtcccccaatccccagagcttggagtctgggccccacacccagccctgccttggtccctgagcctcagagcgtggaattgctgccctgtggacactggctgggaaggcaggtcttcccctagcacatggggaccccggcctcgagggtgacctccctaccttgcccctgccagccaccaagcgcaggtgcagcgggggccagactcctgccggcctcagaggacacctggcccagcacaggcagctagaagggccggtgggcaccggggccgggaagcccccacctcaccacctgagggcccctgggaggctcctctggcctggctgggctgggtctggggccgccacaggcccctcacggggcggcagaggcaacttcagtgtccctgttagagcaacacgggtccctccgtggggggctgggtgcggccccctgccgtgtatttcctccccagggagtggggcctccccgggagctgacgccaccaccctgcttagccctcacagggccccaaggtgtccgagtgtgttgggtctgaacgcgaaataaagaaatcctctcagcccgcctttgccagcgtcgtccctcccaccccacccagaccacgtccaacagcctgggactttcgggaccctggggtcggggcaccgtgtggagtgagacaggcgtgaaagacagcggctgcggccacccagggcaccagccacatcctcttcctcgtccccgcccctcagcctccctcctctggctcctggctggtgggtctgggggcaaggcagaggcgctccaggtggaggggggcgggccggggtgcccacgctggggtgacgcaagaagaaaactcccgggcctcagagtcggcgccggaaacctaggtctgggtttccctcgtggtggttgtgtactgaggacctggaagtgatcatattctggatctcttcggttaaataaaatcagcggttaggattcacaaaaaaaaaaaa

SEQ ID NO: 408 - DNA, 4174 bp, Homo sapiens
gaggcagcagtgggaacgactcatcctttttccagccctggggcgtggctggggtcggggtcggggtcggggccggtgggggccccgcccccgtctcctggcctgcccccttcatgggccgcgatgatggcggccctgtacccgagcacggacctctcgggcgcctcctcctcctccctgccttcctctccatcctcttcctcgccgaacgaggtgatggcgctgaaggatgtgcgggaggtgaaggaggagaatacgctgaatgagaagcttttcttgctggcgtgcgacaagggtgactattatatggttaaaaagattttggaggaaaacagttcaggtgacttgaacataaattgcgtagatgtgcttgggagaaatgctgttaccataactattgaaaacgaaaacttggatatactgcagcttcttttggactacggttgtcagtctgcagatgcacttttggtggcaatcgactctgaagtagtgggagctgttgatatactacttaatcatcgaccaaaacgatcatcaagaccaactatagtaaaactaatggaacgaattcagaatcctgagtattcaacaactatggatgttgcacctgtcattttagctgctcatcgtaacaactatgaaattcttacaatgctcttaaaacaggatgtatctctacccaagccccatgcagttggctgtgaatgcacattgtgttctgcaaaaaacaaaaaggatagcctccggcattccaggtttcgtcttgatatatatcgatgtttggccagtccagctctaataatgttaacagaggaggatccaattctgagagcatttgaacttagtgctgatttaaaagaactaagtcttgtggaggtggaattcaggaatgattatgaggaactagcccggcaatgtaaaatgtttgctaaggatttacttgcacaagcccggaattctcgtgaattggaagttattctaaaccatacgtctagtgacgagcctcttgacaaacggggattattagaagaaagaatgaatttaagtcgtctaaaacttgctatcaaatataaccagaaagagtttgtctcccagtctaactgccagcagttcctgaacactgtttggtttggacagatgtcaggttaccgacgcaagcccacctgtaagaagataatgactgttttgacagtaggcatcttttggccagttttgtcactttgttatttgatagctcccaaatctcagtttggcagaatcattcacacaccttttatgaaatttatcattcatggagcatcatatttcacatttctgctgttgcttaatctatactctcttgtctacaatgaggataagaaaaacacaatggggccagcccttgaaagaatagactatcttcttattctgtggattattgggatgatttggtcagacattaaaagactctggtatgaagggttggaagactttttagaagaatctcgtaatcaactcagttttgtcatgaattctctttatttggcaacctttgccctcaaagtggttgctcacaacaagtttcatgattttgctgatcggaaggattgggatgcattccatcctacactggtggcagaagggctttttgcatttgcaaatgttctaagttatcttcgtctcttttttatgtatacaaccagctctatcttgggtccattacagatttcaatgggacagatgttacaagattttggaaaatttcttgggatgtttcttcttgttttgttttctttcacaattggactgacacaactgtatgataaaggatatacttcaaaggagcagaaggactgtgtaggcatcttctgtgaacagcaaagcaatgataccttccattcgttcattgggcacctgctttgctttgttctggtatattttctccttagcgcatgtgggcaatctttgtcacaagatttagctatggagaagaactgcagtcctttgtgggagctgtcattgttggtacatacaatgtcgtggttgtgattgtgcttaccaaactgctggtggcaatgcttcataaaagctttcagttgatagcaaatcatgaagacaaagaatggaagtttgctcgagcaaaattatggcttagctactttgatgacaaatgtacgttacctccacctttcaacatcattccctcaccaaagactatctgctatatgattagtagcctcagtaagtggatttgctctcatacatcaaaaggcaaggtcaaacggcaaaacagtttaaaggaatggaggaatttgaaacagaagagagatgaaaactatcaaaaagtgatgtgctgcctagtgcatcgttacttgacttccatgagacagaagatgcaaagtacagatcaggcaactgtggaaaatctaaacgaactgcgccaagatctgtcaaaattccgaaatgaaataagggatttacttggctttcggacttctaaatatgctatgttttatccaagaaattaaccattttctaaatcatggagcgaataattttcaataacagatccaaaagactatattgcataacttgcaatgaaattaatgagatatatattgaaataaagaattatgtaaaagccattctttaaaatatttatagcataaatatatgttatgtaaagtgtgtatatagaattagttttttaaaccttctgttagtggctttttgcagaagcaaaacagattaagtagatagattttgttagcatgctgcttggttttcttacttagtgctttaaaatgtttttttttatgtttaagaggggcagttataaatggacacattgcccagaatgttttgtaaaatgaagaccagcaaatgtaggctgatctccttcacaggatacacttgaaatatagaagttatgttttaaatatctctgttttaggagttcacatatagttcagcatttattgtttaggagtataattttattttatctaaaataatagtctattttttcttttgtattttgttataatcttaagcaacaaagaaaaaaccctaatatttgaatctatttatgtctttcaatttaaattcacttcagtttttgttattgtaatatatttacttttacatggttataatcactttatatttttaatgtttttttcacttaatattttatatatacatttccatgtattgatgtagttagtccacatttaaatttttatagaattatatagtttttgaaaaatacagtcagtagatgttttattttttagctattcagttatgtttataagtttgcatagctacttctcgacatttggtttgttttaatttttttgtatcataatagtcctatttttttttcaagttggagtgaatgtttttagttttaagatagataggagacacttttttatcacatgtagtcacaacctgttttgtttttgtaaaacataggaagtctctttaatgcaatgatttgttttatatttggactaaggttcttgagcttatctcccaaggtactttccataatttaacacagcttctataaaagtgacttcatgcttacttgtggatcattcttgctgcttaagatgaaaagcattggttttttaaaattagagaataaaatatgtatttaaatttttggtgtgttcacataaagggatgtagctaaaatgttttcataggctattatatattctcgcagcatttccagttaagaggatattaggtatataattctcttcttaaccgaatgtcagatggtcttacgccacagggtgcaggtaacccttggtctgtaagcaccaccgatccagggatcattgtctaaataggttactattgtttgtttcatcttgcttttgcatttttattttttaatttccaaattttaagtgttccctctttggggcaaattcttataaaaatgtttattgtaaagttatatattttgtctacgatgggattatgcacttcccaattgggattttacatctggatttttagtcattctaaaaaacacctaattattaaaacatttatagagtgcctactgtatgcatgagttgagttgcttctgaggtacattttgaatgacagcatattgtagaaaaaaaaaggtgaataaaatttgacattagattataaaaaaaaaaaggaattc

SEQ ID NO: 409 - DNA, 5651 bp, Homo sapiens
cttcctgtttctcaccattcggcttatttgttttccctcctcttaggattgccccctgtgggtcactttctcagtcattttgagctcagcctaatcaaagactgaggttatgaagtcgatcctagatggccttgcagataccaccttccgcaccatcaccactgacctcctgtacgtgggctcaaatgacattcagtacgaagacatcaaaggtgacatggcatccaaattagggtacttcccacagaaattccctttaacttcctttaggggaagtcccttccaagagaagatgactgcgggagacaacccccagctagtcccagcagaccaggtgaacattacagaattttacaacaagtctctctcgtccttcaaggagaatgaggagaacatccagtgtggggagaacttcatggacatagagtgtttcatggtcctgaaccccagccagcagctggccattgcagtcctgtccctcacgctgggcaccttcacggtcctggagaacctcctggtgctgtgcgtcatcctccactcccgcagcctccgctgcaggccttcctaccacttcatcggcagcctggcggtggcagacctcctggggagtgtcatttttgtctacagcttcattgacttccacgtgttccaccgcaaagatagccgcaacgtgtttctgttcaaactgggtggggtcacggcctccttcactgcctccgtgggcagcctgttcctcacagccatcgacaggtacatatccattcacaggcccctggcctataagaggattgtcaccaggcccaaggccgtggtggcgttttgcctgatgtggaccatagccattgtgatcgccgtgctgcctctcctgggctggaactgcgagaaactgcaatctgtttgctcagacattttcccacacattgatgaaacctacctgatgttctggatcggggtcaccagcgtactgcttctgttcatcgtgtatgcgtacatgtatattctctggaaggctcacagccacgccgtccgcatgattcagcgtggcacccagaagagcatcatcatccacacgtctgaggatgggaaggtacaggtgacccggccagaccaagcccgcatggacattaggttagccaagaccctggtcctgatcctggtggtgttgatcatctgctggggccctctgcttgcaatcatggtgtatgatgtctttgggaagatgaacaagctcattaagacggtgtttgcattctgcagtatgctctgcctgctgaactccaccgtgaaccccatcatctatgctctgaggagtaaggacctgcgacacgctttccggagcatgtttccctcttgtgaaggcactgcgcagcctctggataacagcatgggggactcggactgcctgcacaaacacgcaaacaatgcagccagtgttcacagggccgcagaaagctgcatcaagagcacagtcaagattgccaaggtaaccatgtctgtgtccacagacacgtctgccgaggctctgtgagcctgatgcctccctggcagcacaggaaaagaatttttttttttaagctcaaaatctagaagagtctattgtctccttggttatatttttttaactttaccatgctcaatgaaaaggtgattgtcaccatgatcacttatcagtttgctaatgtttccatagtttaggtactcaaactccattctccaggggtttacagtgaagaaagcctgttgtttaagtgactgaacgatccttcaaagtctcaatgaaataggagggaaacctttggctacacaattggaagtctaagaacccatggaaaaatgccatcaaatgaataatgccttgtaaccacaactttcactataatgtgaaatgtaactgtccgtagtatcagagatgtccatttttacaagttatagtactagagatattttgtaaaatgtattatgtcctgtgagatgtgtatcagtgtttatgtgctattaatatttgtttagttcagcaaaactgaaaggtagacttttatgagaacaatggacaagcagtggatacgtgtcaatgtgtgcactttttttctatattattgcccatgatataactttagaaataaaccttaatatttcttcaaatatctctatttaattttgacactgaaataaccgtaaaggtttatttttctgttacctcaacaagaagaatttgaagacttcaaaatattgagcagaattcattcatacttaaaaatttattagccctgcattttcataggaagacacattatcttctggactatagctgttctaatggattataatcagaatggaagagagaaagcatattgactttttttgagcgacatctctgactttctttagtctttagctattactggatctcttaagacagcatgtgttaatcttaatgtatatcgttatcactgtgcagttgctgtttacttgaatagtattgtgttcctatattccaggtttaagtagatttcatgcctgggtggccaaacaacagtcttcattttttttaattgaaaagaagtagtgtctggatcagtaaaattatactgtgtgtgagtgtgaatataaatgtgtgtatgtgtgtttctgtccgtaactgttacagtaatgtcataaagtgagaaaactgtgaccaagtataaacttttaccacttgctgcactcttgcacatggattcagtttctaaaattgagttcttcctgtaatcttgttgataaaaatactgactccaaccattcaaaaatttcaccccatccctccttaagagattggatcaagtattactaaattgacctttaggtattacacaagaccagtgcttagcaaaaaataatgacaggcatccaaggaagggatgtatttgtagtgttattgccaggaaaggagagtactttggtttctgagcaccgaatattgagcaatatgtcagtcactaaaaggaagacagttctacagaaaaacaatggtaacatttttcaatagcgtgtgtagatagtatgcactatatacatcacgttaaagtaggactatcacacccagcccatgtggctaaaaaagctgaatcagacagtggatgagacacacaacggcagtgaagaaccgatacacttggcattgacgtctagctatgctgtatctgtgctttgcccacatgcccttggtgacagctgagcacccagctctgtcttggtaggtttgggctaaggaacaaatctctcctttgctcgtggttagcaagatacactcaagcatgaagataaacacagctgctttcttctacacccggtctcatgctccttaatggcgccatgggtgcttgttgggcctttttccagtaaggaatgatattgctgaagaatctacttaaccctgacaaattttaattataatctcttcttatacagataaaacatgactcctacaaggccccaaggtttacatagtctgaagtgaagtacagagctggcatctatctggtgatttctagctctcgagatacccaagcagcctgatggggcagttccccttcttacggttcacgctctaaggcaggatgtggcttatgagatactttgcattgtctgtctgcacaccttgaatctgcctgctggctcccttactttacctctctgtcatgtgcagatgaaggctcagggtgctagaggattagtaagatctctttctaaagacaggagagattatttacaagaagaactcaccagggtttagtttgcatttaagaattgccagtcttttgtcctgcatcatcttgaacattaatccacatgtttcagagctcaccaggcagtaccaatgctcttttcacagctatgaagagctagagaaattcttgttatggtagaaaaatttcacgattcatttttgaaactgcatttgtgcgtatgcagtgtagattttatagtgtgttgtgctttcaagatctaaatcatatataataaattaagggacaatggggctgacagcactaaacttggtgcttattgatattctaagaaatatctgtgaaatatcatcacgtatgttatacaaccttcatttaaaaaggtttaaaactagttagattcactttgacacttttcatatcatttcttaacccaagtgacgaaaacattgtccccaatgaatatactcattagaattaccatttgttaatatcactcattaattaaccccataattagatccattaatttaaatgatttaaatttaagtaagttttataaggtctgacatcagaggtatcttactttcctctgaggatgatgtacttgccctgaccatgcattttaccatcacacatgttcagaaagggccaaattcccaacctgctcatttttttttttatcagagtcatgatgaatcagtcctagaatgtttcatttgcacaagtagggctgcctccaagaggaacctctgatttattttgtatgaaatatatgtgaaaggatatgaatctgagagatgctgtagacatctgtcctacacttgagatgatttccaagcctctctggcactttgagttaagtctatctggtattaaatgccaaggaccttttgctgcctaaatccactctgcaggaaataggcccaaccaccagatgagaattaggccctggatgagtagcgctatagttactgtcctgttgattaatttctgccatttcatgtccataaaagagaccacccatatcatgcacacaattagatttctcacactctaactgtatatttgtatgatattttaaaatctcctaaatgctgggcaatggctattaacaattaattgtcttgcactgggccttctgatgaaatgttaacaatgcctattgtaatatagaaaaaaacattctatctactgatttgggctgaatgtatgtaaataggtttctaaaaagtcagatgtttgagcagtggcctacaaatcagtaattttcggatgggagagtttctttacattgccgtggcatcttaaaagctatcttcatgtaaattgactgtactaggcctactggggatcagagttcccaagaaaggaaaccttttcttgtatctggattcaaatttatttccaatgtttcaagcgggaaacatgactctttattgtctgtaaatctaacattattacttttcctcttagaagaatattgtattgttagatgtttgttgagctggtaacatcgttgcaaccactgcaatatcttcgttagtaatctgtataatactttgtatacaagtactggtaagattgttattaaatgtagcttcagtcattaaattactatagcaaagtagtacttcttctgtaatatttacaatgtattaagcccacagtatattttatttcaatgtaattaaactgttaacttattcaaagagaaaacatctcatcatgtctattgtccaaagttacctggaatcaaataaaaaattctagattaccatgaagaacataaaatgcctttgaactctgccttatttcacagtctgatggcaaaatactaaggatttaatttctaaaagattgctgaactaatttattcctcaaaaagcactaatgactacttgaaaagtggggacatattggatt

SEQ ID NO: 410 - DNA, 2327 bp, Homo sapiens
ccgagccggtttcctttttccggcgctccgggtgcgagagacaggtcgggccccctaggcagcgagccgcagcgcaatcccggcgctcgcccaaggaccctggaagctaccgttaccccgccgggcagcgtgggcgccatgagcagctcgggactgaattcggagaaggtagctgctctgatacagaaactgaattccgacccccagttcgtacttgcccagaatgtcgggaccacccacgacctgctggacatctgtctgaagcgggccacggtgcagcgcgcgcagcatgtgttccagcacgccgtgccccaggagggcaagccaatcaccaaccagaagagctcagggcgatgctggatcttttcttgtctgaatgttatgaggcttccattcatgaaaaagttaaatattgaagaatttgagtttagccaatcttacctgtttttttgggacaaggttgaacgctgttatttcttcttgagtgcttttgtggacacagcccagagaaaggagcctgaggatgggaggctggtgcagtttttgcttatgaaccctgcaaatgatggtggccaatgggatatgcttgttaatattgttgaaaaatatggtgttatccctaagaaatgcttccctgaatcttatacaacagaggcaaccagaaggatgaatgatattctgaatcacaagatgagagaattctgtatacgactgcggaacctggtacacagtggagcaacgaaaggagaaatctcggccacacaggacgtcatgatggaggagatattccgagtggtgtgcatctgtttgggtaatccaccagagacattcacctgggaatatcgagacaaagataaaaattatcagaaaattggccccataacacccttggagttttacagggaacatgtcaagccactcttcaatatggaagataagatttgtttagtgaatgaccctaggccccagcacaagtacaacaaactttacacagtggaatacttaagcaatatggttggagggagaaaaactctatacaacaaccagcccattgacttcctgaaaaagatggttgctgcctccatcaaagatggagaggctgtgtggtttggctgtgatgttggaaaacacttcaatagcaagctgggcctcagtgacatgaatctctatgaccatgagttagtgtttggtgtctccttgaagaacatgaataaagcggagaggctgacttttggtgagtcacttatgacccacgccatgaccttcactgctgtctcagagaaggatgatcaggatggtgctttcacaaaatggagagtggagaattcatggggtgaagaccatggccacaaaggttacctgtgcatgacagatgagtggttctctgagtatgtctacgaagtggtggtggacaggaagcatgtccctgaagaggtgctagctgtgttagagcaggaacccattatcctgccagcatgggaccccatgggagctttggctgagtgatactgccctccagctctttcctccttccatggaacctgacgtagctgcaaaggacagatccagggactgaagccaaagttatgcaagggactgtgtgttgccacaggacacagtcagatttccagtctccaccaggaacctcttcagaaagtgtgctttatgctgaaacagaatactgttaaaggaaaaaaaagaggggggaagatcaggtcatactatctactctcctcatctctaacagctcaggatctcttagcattttaattagatgtaattgtttgtctttaactgtcaaaaagtttggttctgtgtctgtgttttaataagacgagaggacgagcgattgaggtgtatggagagaaaacagacctaatgctccttgttcctagagtagagtggagggagggtggcctaagagttgagctctcggaactgcatgctgctggacagtatcactgtctttcctagatggcagtcactgaattccattttttcaaggtaatttcttgtgcctctaatagcccaagaatgggaggttgatcagatctgacatgattccttcctgttctgaactgtggggtgtgcacatctctgcttgagtcaggtttgagtagaggcttagagacagttgggtgagaacaaccaaaatcttatcatggtctcagtcataatcattagggggaactctagccaaatggtttaacttctgcctgtggaactggggattgggtgggcaggaaaaggtgatatccattctttctgataactagatggtgctgagaagcttttgaataaaaactttgctaaatgagaataagctg

SEQ ID NO: 411 - DNA, 3659 bp, Homo sapiens
cttttgctttctatagcttcaaaatgttcttaatgttaagacattcttaatactctgaaccatatgaatttgccattttggtaagtcacagacgccagatggtggcaatttcacatggcacaacccgaaagattaacaaactatccagcagatgaaaggattttttttagtttcattgggtttactgaagaaattgtttgaattctcattgcatctccagttcaacagataatgagtgagtgatgccacactctcaagagttaaaaacaaaacaacaaaaaaattaaaacaaaagcacacaactttctctctctgtcccaaaatacatacttgcatacccccgctccagataaaatccaaagggtaaaactgtcttcatgcctgcaaattcctaaggagggcacctaaagtacttgacagcgagtgtgctgaggaaatcggcagctgttgaagtcacctcctgtgctcttgccaaatgtttgaaagggaatacactgggttaccgggtgtatgttgggaggggagcattatcagtgctcgggtgaggcaagttcggagtacccagatggagacatccgtgtctgtgtcgctctggatgcctccaagccagcgtgtgtttactttctgtgtgtgtcaccatgtctttgtgcttctgggtgcttctgtgtttgtttctggccgcgtttctgtgttggacaggggtgactttgtgccggatggcttctgtgtgagagcgcgcgcgagtgtgcatgtcggtgagctgggagggtgtgtctcagtgtctatggctgtggttcggtataagtctgagcatgtctgccagggtgtatttgtgcctgtatgtgcgtgcctcggtgggcactctcgtttccttccgaatgtggggcagtgccggtgtgctgccctctgccttgagacctcaagccgcgcaggcgcccagggcaggcaggtagcggccacagaagagccaaaagctcccgggttggctggtaaggacaccacctccagctttagccctctggggccagccagggtagccgggaagcagtggtggcccgccctccagggagcagttgggccccgcccgggccagccccaggagaaggagggcgaggggaggggagggaaaggggaggagtgcctcgccccttcgcggctgccggcgtgccattggccgaaagttcccgtacgtcacggcgagggcagttcccctaaagtcctgtgcacataacgggcagaacgcactgcgaagcggcttcttcagagcacggggctggaactggcaggcaccgcgagcccctagcacccgacaagctgagtgtgcaggacgagtccccaccacacccacaccacagccgctgaatgaggcttccaggcgtccgctcgcggcccgcagagccccgccgtggggtccgcctgctgaggcgcccccagccagtgcgcttacctgccagactgcgcgccatggggcaacccgggaacggcagcgccttcttgctggcacccaatagaagccatgcgccggaccacgacgtcacgcagcaaagggacgaggtgtgggtggtgggcatgggcatcgtcatgtctctcatcgtcctggccatcgtgtttggcaatgtgctggtcatcacagccattgccaagttcgagcgtctgcagacggtcaccaactacttcatcacttcactggcctgtgctgatctggtcatgggcctggcagtggtgccctttggggccgcccatattcttatgaaaatgtggacttttggcaacttctggtgcgagttttggacttccattgatgtgctgtgcgtcacggccagcattgagaccctgtgcgtgatcgcagtggatcgctactttgccattacttcacctttcaagtaccagagcctgctgaccaagaataaggcccgggtgatcattctgatggtgtggattgtgtcaggccttacctccttcttgcccattcagatgcactggtaccgggccacccaccaggaagccatcaactgctatgccaatgagacctgctgtgacttcttcacgaaccaagcctatgccattgcctcttccatcgtgtccttctacgttcccctggtgatcatggtcttcgtctactccagggtctttcaggaggccaaaaggcagctccagaagattgacaaatctgagggccgcttccatgtccagaaccttagccaggtggagcaggatgggcggacggggcatggactccgcagatcttccaagttctgcttgaaggagcacaaagccctcaagacgttaggcatcatcatgggcactttcaccctctgctggctgcccttcttcatcgttaacattgtgcatgtgatccaggataacctcatccgtaaggaagtttacatcctcctaaattggataggctatgtcaattctggtttcaatccccttatctactgccggagcccagatttcaggattgccttccaggagcttctgtgcctgcgcaggtcttctttgaaggcctatgggaatggctactccagcaacggcaacacaggggagcagagtggatatcacgtggaacaggagaaagaaaataaactgctgtgtgaagacctcccaggcacggaagactttgtgggccatcaaggtactgtgcctagcgataacattgattcacaagggaggaattgtagtacaaatgactcactgctgtaaagcagtttttctacttttaaagacccccccccgcccaacagaacactaaacagactatttaacttgagggtaataaacttagaataaaattgtaaaattgtatagagatatgcagaaggaagggcatccttctgccttttttatttttttaagctgtaaaaagagagaaaacttatttgagtgattatttgttatttgtacagttcagttcctctttgcatggaatttgtaagtttatgtctaaagagctttagtcctagaggacctgagtctgctatattttcatgacttttccatgtatctacctcactattcaagtattaggggtaatatattgctgctggtaatttgtatctgaaggagattttccttcctacacccttggacttgaggattttgagtatctcggacctttcagctgtgaacatggactcttcccccactcctcttatttgctcacacggggtattttaggcagggatttgaggagcagcttcagttgttttcccgagcaaagtctaaagtttacagtaaataaattgtttgaccatgccttcattgcacctgtttctccaaaaccccttgactggagtgctgttgcctcccccactggaaaccgcaggtaactacttgtaattactgcccatgacttaatgtagaatgatacaagaatgacatgcacagattgcttaaccctttcatttgcctttgagtctgctgctgcaaagctgcatctctcctgacacttgtgccccaaatcagttctgcctgctcttagtatagctcaactctccctatggttattgttctgtgttgttacctcagaaacactgactcacagaagcggagttaaggggatatgtttttttctctccacgtgcacccaccacccaccttccagttctacttgtttcaaaactgtttatatttctgtcttggccatgtgtttacag

SEQ ID NO: 412 - DNA, 1503 bp, Homo sapiens
cgctcccgccgctcctccacgctcgtgccgccccccccgcgctcccagttgacgctctgggccgccacctccgcggaccctgcagcgcaagagccaagccgccagcgctggctatgtgggccacgctgccgctgctctgcgccggggcctggctcctgggagtccccgtctgcggtgccgccgaactgtccgtgaactccttagagaagtttcacttcaagtcatggatgtctaagcaccgtaagacctacagtacggaggagtaccaccacaggctgcagacgtttgccagcaactggaggaagataaacgcccacaacaatgggaaccacacatttaaaatggcactgaaccaattttcagacatgagctttgctgaaataaaacacaagtatctctggtcagagcctcagaattgctcagccaccaaaagtaactaccttcgaggtactggtccctacccaccttccgtggactggcggaaaaaaggaaattttgtctcacctgtgaaaaatcagggtgcctgcggcagttgctggactttctccaccactggggccctggagtctgcgatcgccatcgcaaccggaaagatgctgtccttggcggaacagcagctggtggactgcgcccaggacttcaataatcacggctgccaagggggtctccccagccaggctttcgagtatatcctgtacaacaaggggatcatgggtgaagacacctacccctaccagggcaaggatggttattgcaagttccaacctggaaaggccatcggctttgtcaaggatgtagccaacatcacaatctatgacgaggaagcgatggtggaggctgtggccctctacaaccctgtgagctttgcctttgaggtgactcaggacttcatgatgtatagaacgggcatctactccagtacttcctgccataaaactccagataaagtaaaccatgcagtactggctgttgggtatggagaaaaaaatgggatcccttactggatcgtgaaaaactcttggggtccccagtggggaatgaacgggtacttcctcatcgagcgcggaaagaacatgtgtggcctggctgcctgcgcctcctaccccatccctctggtgtgagccgtggcagccgcagcgcagactggcggagaaggagaggaacgggcagcctgggcctgggtggaaatcctgccctggaggaagttgtggggagatccactgggacccccaacattctgccctcacctctgtgcccagcctggaaacctacagacaaggaggagttccaccatgagctcacccgtgtctatgacgcaaagatcaccagccatgtgccttagtgtccttcttaacagactcaaaccacatggaccacgaatattctttctgtccagaagggctactttccacatatagagctccagggactgtcttttctgtattcgctgttcaataaacattgagtgagcacctccccagatggagcatgctggtcctggaa

SEQ ID NO: 413 - DNA, 2153 bp, Homo sapiens; identical to SEQ ID NO: 87

SEQ ID NO: 414 - DNA, 2090 bp, Homo sapiens
cccggcgcagctcatggtgagcgcctctggggctcgagggtcccttggctgagggggcgcatcctcggggtgcccgatggggctgcctgggggtcgcagggctgaagttgggatcgcgcacaaaccgaccctgcagtccagcccgaaatgctgccgccaggcagcaacggcaccgcgtacccggggcagttcgctctataccagcagctggcgcaggggaacgccgtggggggctcggcgggggcaccgccactggggccctcacaggtggtcaccgcctgcctgctgaccctactcatcatctggaccctgctgggcaacgtgctggtgtgcgcagccatcgtgcggagccgccacctgcgcgccaacatgaccaacgtcttcatcgtgtctctggccgtgtctgaccttttcgtggcgctgctggtcatgccctggaaggcagtcgccgaggtggccggttactggccctttggagcgttctgcgacgtctgggtggccttcgacatcatgtgctccactgcctccatcctgaacctgtgcgtcatcagcgtggaccgctactgggccatctccaggcccttccgctacaagcgcaagatgactcagcgcatggccttggtcatggtcggcctggcatggaccttgtccatcctcatctccttcattccggtccagctcaactggcacagggaccaggcggcctcttggggcgggctggacctgccaaacaacctggccaactggacgccctgggaggaggacttttgggagcccgacgtgaatgcagagaactgtgactccagcctgaatcgaacctacgccatctcttcctcgctcatcagcttctacatccccgttgccatcatgatcgtgacctacacgcgcatctaccgcatcgcccaggtgcagatccgcaggatttcctccctggagagggccgcagagcacgcgcagagctgccggagcagcgcagcctgcgcgcccgacaccagcctgcgcgcttccatcaagaaggagaccaaggttctcaagaccctgtcggtgatcatgggggtcttcgtgtgttgctggctgcccttcttcatccttaactgcatggtccctttctgcagtggacaccccgaaggccctccggccggcttcccctgcgtcagtgagaccaccttcgacgtcttcgtctggttcggctgggctaactcctcactcaaccccgtcatctatgccttcaacgccgactttcagaaggtgtttgcccagctgctggggtgcagccacttctgctcccgcacgccggtggagacggtgaacatcagcaatgagctcatctcctacaaccaagacatcgtcttccacaaggaaatcgcagctgcctacatccacatgatgcccaacgccgttacccccggcaaccgggaggtggacaacgacgaggaggagggtcctttcgatcgcatgttccagatctatcagacgtccccagatggtgaccctgttgctgagtctgtctgggagctggactgcgagggggagatttctttagacaaaataacacctttcaccccgaatggattccattaaactgcattaagaaaccccctcatggatctgcataaccgcacagacactgacaagcacgcacacacacgcaaatacatggctttccagtgctgctccctttatcatgtgtttctgtgtagtagctcgtgtgcttagaaacctcaccccattgattgatagttcgaagaattggcagaagcagttgcaataaactcagtcaaatgtacccagcctaccagagatggaccaacgatcctatgagagaagagagtatggtgctgggtccttaaaaaaaaaaatgatacttggtccttaaaaaatatgctctcccctccctttttaaacaaatggcttgttcagtcacttgtttgtgtttgaattgatttttaaacagcaggttgtgtgtgtgtgcagtgatgtggtgggagcacagctttcctgggtctggattcccgtggctttgtgcttatgtcatttcttctctctgtgctggtgggggcctctttaccatagcttaagaagtatccctg

SEQ ID NO: 415 - DNA, 1543 bp, Homo sapiens
ggggccgggggacggcgacacggggtcggcgggccgcaggagggggtcatgggtaaagattactaccagacgttgggccaggccgcggcgctcggacgaggagatcaagcgggcctaccgccgccaggcctgcgctaccacccggacaagaacaaggagcccggcgccgaggagaagttcaaggagatcgctgaggcctacgacgtgctcagcgacccgcgcaagcgcgagatcttcgaccgctacttggaggaaggcctaaaggggagtggccccagtggcggtacggcggaggagccaatggtacctctttcagctacacattccatggagaccctcatgccatgtttgctgagttcttcggtggcagaaatccctttgacaccttttttgggcagcggaacggggaggaaggcatggacattgatgacccattctctggcttccctatggggcatgggtggcttcaccaacgtgaactttggccgctcttgctctgcccaagagcccgcccgaaagaagcaagatcccccagtcacgcacgaccttcgagtctcccttgaagagatctacagcggctgtaccaagaagacgaaaatctcccacaagcggctaaaccccgacggaaagagcattcgaaacgaagacaaaatattgaccatcgaagtgaagaaggggtggaaagaaggaaccaaaatcactttccccaaggaaggagaccagacctccaacaacattccagctgatatcgtctttgttttaaaggacaagccccacaatatctttaagagagatggctctgatgtcatttatcctgccaggatcagcctccgggaggctctgtgtggctgcacagtgaacgtccccactctggacggcaggacgatacccgtcgtattcaaagatgttatcaggcctggcatgcggcgaaaagttcctggagaaggcctccccctccccaaaacacccgagaaacgtggggacctcattattgagtttgaagcgatcttccccgaaaggattccccagacatcaagaaccgtacttgagcaggttcttccaatatagctatctgagctccccaaggactgaccagggacctttccagagctcaaggatttctggacctttctaccagttgtggaccatgagagggtgggagggcccagggagggctttcgtactgctgaatgttttccagagcatatattacaatctttcaaagtcgcacactagacttcagtggtttttcgagctatagggcatcaggtggtgggaacagcaggaaaaggcattccagtctgccccactgggtctggcagccctcccgggatgggcccacatccacctccagtccctggccaggggtgagaggcagaccagcagatggacttgatccctctgtgtctttttgcttctggctggtagataatgtcaacctgcagtcttgattcccagaccctgtacactcctccttttctgccgcgcgatcagtttgtgctttattctgtatttgtctcccatgtcttgctcttctcctgga

SEQ ID NO: 416 - DNA, 2879 bp, Homo sapiens
cccgcctgacgactgaccagttgccatggcatcctactacgagatcctagacgtgccgcgaagtgcgtccgctgatgacatcaagaaggcgtatcggcgcaaggctctccagtggcacccagacaaaaacccagataataaagagtttgctgagaagaaatttaaggaggtggccgaggcatatgaagtgctgtctgacaagcacaagcgggagatttacgaccgctatggccgggaagggctgacagggacaggaactggcccatctcgggcagaagctggcagtggtgggcctggcttcaccttcaccttccgcagccccgaggaggtcttccgggaattctttgggagtggagacccttttgcagagctctttgatgacctgggccccttctcagagcttcagaaccggggttcccgacactcaggccccttctttaccttctcttcctccttccctgggcactccgatttctcctcctcatctttctccttcagtcctggggctggtgcttttcgctctgtttctacatctaccacctttgtccaaggacgccgcatcaccacacgcagaatcatggagaacgggcaggagcgggtggaagtggaggaggatgggcagctgaagtcagtcacaatcaatggtgtcccagatgacctggcacgtggcttggagctgagccgtcgcgagcagcagccgtcagtcacttccaggtctgggggcactcaggtccagcagacccctgcctcatgccccttggacagcgacctctctgaggatgaggacctgcagctggccatggcctacagcctgtcagagatggaggcagctgggaagaaacccgcaggtgggcgggaggcacagcaccgacggcaggggcgcccaaggcccagcaccaagatccaggcttgggggggacccaggagggtgcgaggggtgaagcaaccaaacgcagtccatccccagaggagaaggcctctcgctgcctcatcctctgaacaccgggcccaacctgatctgatccagatcttgactggggggtctgactcactgtgggaagagaagaggggagtatcctgagttgtaggaactgctttccaactccaagctccctccacaagtttccctccccaggccccccacaccccagtgtggacttgggatttgctgtgctcagcccagggctgataggtccctggtgaagcccagggtggggggtgtcagggcagtggaggggcccgaggagccaggttgcatttattggatggggagctccaaggggcattagtggtttgggctgggcttttgtgccctggtactctgccacctgtgttgctgatggtgtcaaggaaggaggacttggcctagggttgtctgagccggagccggcagctccactggagagcagtgcaggcagagtggagcctcctgctctcctggaccagctgcagacccccaaccctggtttctgtgccatgttgcgctctgaccgtctctgttgcttctcttctggtgttgcttctcctccctcccattctctctgcaactcctgcgggcgcatcgcttgctttcactgccgtctggctaggactcccttcttccttccttccccgagaaggcctcaatgtggcgaggaagatgctggggccggtagggctgtgagatcttctggggaggctagccgggtggggcgggagcctctcagctgtccagattcagaactggagcccactcctcctccctctcgttgcctcagccctgccctcaccctcagactaggcagaggtgaggctggctcaccctgaagaggtgggataggaggggactgcacccatactgcttccctaccacaaatcagggctcagggagaggccatgcggcagcccaggtctgcatgctgagccccatcctccacagcttgccgctgacgctctctcctgtcaccccgcccctgctctctccccagatgtgttctgagctggatgccgggttccagaatcgctgcacagttccaacaggacagcgccttcccccatgcgctgggaggggaccctccatttctccccctcacccatgctgagtgtagagccggggcctgggtggcgggtgggggccgggtgggaggtggcagtagtcttagcctgtgcactctcttccttgggtgtttggtgctggctcctggggactacaaatcccagagtgcggtgtgcccggcctcatttctgatagatcccgcttgggggaggtggtgtatggttacggagctgtgcatcttgggacatgtagtagcccaggtcttgtcactcgctgtgagatggggagattttgtcttttgatttatccctgtagggctggcagggttgtagatgaagggggaatgatctgagccttggttcccctgacacgtcttgctagccccagggttagagtgggcagggcagagccgcgcagcacctgggagcggtacctttcccttgggcagcctggggtcccaggaacaagccagggcgagtggcatgtctgcctgagcagggtgtggccccagaaagctgaggagtgtgggctggcagagagcttcgagggcaaggccacccgcgggggcgtgtgtgtggtggggcttggcatgtgatggcagctccagctccaggcatgccgctgcttgtatggctttctttggcctctgaccctgctgcccattctttccaacatcacagatgaactgcctctcctcctccctgcctggggagcccagtggccagggagggagtggtggagccagtcgctgtaacactgagcctcagagacgaaccaaaaccagctgggctgagctcagatccagggggaagaaatgctggaagtcaataaaactgagtttgag

SEQ ID NO: 417 - DNA, 4131 bp, Homo sapiens
tcaagctcgccccgcgcagcccgagccgggctgggcgctgtcctcgggggcctggggaaccgcgcggtttggagatcggaggcacctggaacccgtggcaagcgccgagccgggagacagcccgaggaaccacgggttctggagctaggagccggaagctgggagtccggaggagagcggagcccggagcccggagcccggggcggcgcgtctgggtctggcgcttcccgactggacggcgcgcccgctggtcttcgccacgcgccctcccctgggctcgcgttcatcggtccccgcctgagacgcgcccactcctgcccggacttccagccccggaggcgccggacagagccgcggactccagcgcccaccatgcgcctcaacagctccgcgccgggaaccccgggcacgccggccgccgaccccttccagcgggcgcaggccggactggaggaggcgctgctggccccgggcttcggcaacgcttcgggcaacgcgtcggagcgcgtcctggcggcacccagcagcgagctggacgtgaacaccgacatctactccaaagtgctggtgaccgccgtgtacctggcgctcttcgtggtgggcacggtgggcaacacggtgacggcgttcacgctggcgcggaagaagtcgctgcagagcctgcagagcacggtgcattaccacctgggcagcctggcgctgtccgacctgctcaccctgctgctggccatgcccgtggagctgtacaacttcatctgggtgcaccacccctgggccttcggcgacgccggctgccgcggctactacttcctgcgcgacgcctgcacctacgccacggccctcaacgtggccagcctgagtgtggagcgctacctggccatctgccaccccttcaaggccaagaccctcatgtcccgaagccgcaccaagaagttcatcagcgccatctggctcgcctcggccctgctgacggtgcctatgctgttcaccatgggcgagcagaaccgcagcgccgacggccagcacgccggcggcctggtgtgcacccccaccatccacactgccaccgtcaaggtcgtcatacaggtcaacaccttcatgtccttcatattccccatggtggtcatctcggtcctgaacaccatcatcgccaacaagctgaccgtcatggtacgccaggcggccgagcagggccaagtgtgcacggtcgggggcgagcacagcacattcagcatggccatcgagcctggcagggtccaggccctgcggcacggcgtgcgcgtcctacgtgcagtggtcatcgcctttgtggtctgctggctgccctaccacgtgcggcgcctcatgttctgctacatctcggatgagcagtggactccgttcctctatgacttctaccactacttctacatggtgaccaacgcactcttctacgtcagctccaccatcaaccccatcctgtacaacctcgtctctgccaacttccgccacatcttcctggccacactggcctgcctctgcccggtgtggcggcgcaggaggaagaggccagccttctcgaggaaggccgacagcgtgtccagcaaccacaccctctccagcaatgccacccgcgagacgctgtactaggctgtgcgccccggaacgtgtccaggaggagcctggccatgggtccttgcccccgacagacagagcagcccccacccgggagccttgatgggggtcaggcagaggccagcctgcactggagtctgaggcctgggacccccccctcccaccccctaacccatgtttctcattagtgtctcccgggcctgtccccaactcctccccacccctcccccatctcctctttgaaagccagaacaagagagcgctcctctcccagataggaaaagggcctctaacaaggagaaattagtgtgcggcaaaaggcagttttctttgttctcagactaatggatggttccagagaaggaaatgaaatgtgctgggtggggccgggcctccggcggcccggctgctgttcccatgtccacatctctgaggcctgcaccccctctgtctagctcggggagtccagccccagtcccgcaggctccgtggctttgggcctcacgtgcagaccctgccatgcagacccatgcccccctcccccaggcagctccaagaaagctccctgactcgccccttcaggcctggcaagctgggggcccatcgccgtggggagtccctcccaccaccctcgccgcaggcagctgcagcccccagaggggaccacaagcccaaaaaggacaaaaatgggctggcctggaatggcccagaccccagcctcccctcctccctcccatcctcacccaggccaaggcccaggggctctgccaggacaccacatgggagggggctcaggcctcagcctcaagatcttcagctgtggcctctcgggctcggcagaagggacgccggatcaggggcctggtctccagcacctgcccgagtggccgtggccaggatggggtgcgcattccgtgtgctttgcttgtagctgtgcaggctgaggtctggagccaggcccagagctggcttcagggtggggccttgagaaggggaatgtgggacaggggcgatggtgcctggtctctgagtaagatgccaggtcccaggaactcaggcttcaggtgagaaggagcggtgtgtccaggcaccgctggccggcagccctgggctgaggcacagactcatttgtcaccttctggcggcggcagccctggccccggcctccaagcagttgaaaaagctggcgcctccttggtctctaggatccaggctccacagagcacatgactagccaggcccctggcttaagaaggtcgcctaagcctaagagaagacagtcccaggagaagctggccgggaccagccaggagctgggagccacaggaagcaaaagtcagccttttcttcaagggatttccctgtctcagagcagcctttgccccagggaaatgggctctgggctggctgcctgcaccggccatgtcgacccaggacccggacacctggtcttgggctgtgttcagccactttgccttctctggactcagtttccccgtctgagaaatgagagtcgaatgctacagtatctgcagtcgcttggatctggctgttgagttgacgggttccttgaaccccacaaaatccctctccaaccacaggacccttcggctcaccaagaacggggcccaggggagtcaggcctattcgctgcacttcctgccaaactttgcccccacaagcctggtcatcagccaggcagcccttccagtgcccaagggccaccaaccccagggaaacagggccagcacagaggggccttcctcccccacagagctcccatgacatagtctgctctgggcggaagagctttgctgccagccagggatgtccagaggtcggtgcagcccctatccctgctcaggagtgggctcagagtctagcaaatgctaaggcccctcaggctgggctctgaacgaggacctggactcagagccagacagggcagcctcagacccttctctggggctcctggaccttgggccataatttctgagcctcggtttccccatctaaggaacagatgtggtcgttccgccctctcagctggatgagactgtcctggaggatccaccccggaacagacagaatggtgtctctcaggatggtgctctgagagagggcagagtggatgccccactgccctagaccctcggtagacgtggggtctctggggcggggtctgtggctgtgactgaagtcggctttcccgttgatgtcttgatgctcctatctgtgcacttaccgtaggtagggacacgtgtccatgcaccacagacacacccacgacacctgatctcgtatcactagcttgcggccaggtcatgatgtggccccggaagctggccctgcgtgccatgagtgcgtcggtcatggagtccggagcccctgagccggcccctggtgacggcacagccctcacagctcaaacgcccacccccactcccaccatctgcaggtggtgaaaacaaaccccgtgtatctctcaataaaggtggccgaagggcctcgatgtgg

SEQ ID NO: 418 - DNA, 2740 bp, Homo sapiens
cgctgccatgcggctggcgctgctctgggccctggggctcctgggcgcgggcagccctctgccttcctggccgctcccaaatataggtggcactgaggagcagcaggcagagtcagagaaggccccgagggagcccttggagccccaggtccttcaggacgatctcccaattagcctcaaaaaggtgcttcagaccagtctgcctgagcccctgaggatcaagttggagctggacggtgacagtcatatcctggagctgctacagaatagggagttggtcccaggccgcccaaccctggtgtggtaccagcccgatggcactcgggtggtcagtgagggacacactttggagaactgctgctaccagggaagagtgcggggatatgcaggctcctgggtgtccatctgcacctgctctgggctcagaggcttggtggtcctgaccccagagagaagctataccctggagcaggggcctggggaccttcagggtcctcccattatttcgcgaatccaagatctccacctgccaggccacacctgtgccctgagctggcgggaatctgtacacactcagacgccaccagagcaccccctgggacagcgccacattcgccggaggcgggatgtggtaacagagaccaagactgtggagttggtgattgtggctgatcactcggaggcccagaaataccgggacttccagcacctgctaaaccgcacactggaagtggccctcttgctggacacattcttccggcccctgaatgtacgagtggcactagtgggcctggaggcctggacccagcgtgacctggtggagatcagcccaaacccagctgtcaccctcgaaaacttcctccactggcgcagggcacatttgctgcctcgattgccccatgacagtgcccagctggtgactggtacttcattctctgggcctacggtgggcatggccattcagaactccatctgttctcctgacttctcaggaggtgtgaacatggaccactccaccagcatcctgggagtcgcctcctccatagcccatgagttgggccacagcctgggcctggaccatgatttgcctgggaatagctgcccctgtccaggtccagccccagccaagacctgcatcatggaggcctccacagacttcctaccaggcctgaacttcagcaactgcagccgacgggccctggagaaagccctcctggatggaatgggcagctgcctcttcgaacggctgcctagcctaccccctatggctgctttctgcggaaatatgtttgtggagccgggcgagcagtgtgactgtggcttcctggatgactgcgtcgatccctgctgtgattctttgacctgccagctgaggccaggtgcacagtgtgcatctgacggaccctgttgtcaaaattgccagctgcgcccgtctggctggcagtgtcgtcctaccagaggggattgtgacttgcctgaattctgcccaggagacagctcccagtgtccccctgatgtcagcctaggggatggcgagccctgcgctggcgggcaagctgtgtgcatgcacgggcgttgtgcctcctatgcccagcagtgccagtcactttggggacctggagcccagcccgctgcgccactttgcctccagacagctaatactcggggaaatgcttttgggagctgtgggcgcaaccccagtggcagttatgtgtcctgcacccctagagatgccatttgtgggcagctccagtgccagacaggtaggacccagcctctgctgggctccatccgggatctactctgggagacaatagatgtgaatgggactgagctgaactgcagctgggtgcacctggacctgggcagtgatgtggcccagcccctcctgactctgcctggcacagcctgtggccctggcctggtgtgtatagaccatcgatgccagcgtgtggatctcctgggggcacaggaatgtcgaagcaaatgccatggacatggggtctgtgacagcaacaggcactgctactgtgaggagggctgggcaccccctgactgcaccactcagctcaaagcaaccagctccctgaccacagggctgctcctcagcctcctggtcttattggtcctggtgatgcttggtgccggctactggtaccgtgcccgcctgcaccagcgactctgccagctcaagggacccacctgccagtacagggcagcccaatctggtccctctgaacggccaggacctccgcagagggccctgctggcacgaggcactaagtctcaggggccagccaagcccccacccccaaggaagccactgcctgccgacccccagggccggtgcccatcgggtgacctgcccggcccaggggctggaatcccgcccctagtggtaccctccagaccagcgccaccgcctccgacagtgtcctcgctctacctctgacctctccggaggttccgctgcctccaagccggacttagggcttcaagaggcgggcgtgccctctggagtcccctaccatgactgaaggcgccagagactggcggtgtcttaagactccgggcaccgccacgcgctgtcaagcaacactctgcggacctgccggcgtagttgcagcgggggcttggggaggggctgggggttggacgggattgaggaaggtccgcacagcctgtctctgctcagttgcaataaacgtgacatcttgggagcgttaaaaaaaaaaaaaaa

SEQ ID NO: 419 - DNA, 1056 bp, Homo sapiens
agcaagcccaagaacagcctagtgaagccgccttactcgtacatcgcgctcatcaccatggccatcctgcagagcccgcagaagaagctgaccctgagcggcatctgcgagttcatcagcaaccgcttcccctactacagggagaagttccccgcctggcagaacagcatccgccacaacctctcgctcaacgactgcttcgtcaagatcccccgcgagcccggcaacccgggcaagggcaactactggacgctggacccggagtccgccgccttggggactctgcaccaagggactgccctgtccagtgtcgagaactttactgctaggatttccaattgttaataacgctatgttagcgcgctcgaggaagaaggtaggaatcccggctccttttctcgtcttggtggttcggtgttttgttcgctcctccaggcgcggcccctctcgacctcgcgcgcccattttcgccgctgcgaattctcggacaaaactgtcaacagcccgggcgcgccttttggctctgcgggtccctctatttatgcaaagccgacctatgctacagccccccaacccccgacctggggtagggaggaagagggtgccggggaagggagtccgccctgtccaggcactagaggctcccttgacgtttggcagatgaaaaacaactaagcctttttgaggtgtagagattctcaggtccaggcgttaaaaaataatggtcaaaagaataatacaaaaatagtaaaggtcttgaagaatgccagcgaagcaattcttttttatttgaggacacttgtctggtgtactttttcatgaaaaggaaaaatggttaacatgtttacacaagaaaaaaagtcaaaattatcatttatttcaacctgtgttttgtatcataacagacgtgtggatttttttgtacttactgcgtattctttacaaggagtattgtaaattttactggcaattattattgtactattctaaatgtaagatttttacactttttcagaaataaaaatgcttaattttcaaagaaaattcaccaaaatg

SEQ ID NO: 420 - DNA, 1645 bp, Homo sapiens
atctcagtgtagcagttttctattgctatataacatattccttaaaaatatagcggtttaaagctacacagatgtcttatctcactgttccagaagacaggcatggctcagctgggatctctgcttcagtctcaaaacgatgcaatcaaggtgtcagcagggctgcatttctccctggatgctcagaggaagaatctacttccaagcctctatggtttgaatgtgtcctctccaaaatccagctgttgccaatgggatagtattaagaggtggggacacagaggtcggcaggcagcacacagagggacctacgggcagctgttccttcccccgactcaagaatccccggaggcccggaggcctgcagcaggagcggccatgaagaagctgatggtggtgctgagtctgattgctgcagcctgggcagaggagcagaataagttggtgcatggcggaccctgcgacaagacatctcacccctaccaagctgccctctacacctcgggccacttgctctgtggtggggtccttatccatccactgtgggtcctcacagctgcccactgcaaaaaaccgaatcttcaggtcttcctggggaagcataaccttcggcaaagggagagttcccaggagcagagttctgttgtccgggctgtgatccaccctgactatgatgccgccagccatgaccaggacatcatgctgttgcgcctggcacgcccagccaaactctctgaactcatccagccccttcccctggagagggactgctcagccaacaccaccagctgccacatcctgggctggggcaagacagcagatggtgatttccctgacaccatccagtgtgcatacatccacctggtgtcccgtgaggagtgtgagcatgcctaccctggccagatcacccagaacatgttgtgtgctggggatgagaagtacgggaaggattcctgccagggtgattctgggggtccgctggtatgtggagaccacctccgaggccttgtgtcatggggtaacatcccctgtggatcaaaggagaagccaggagtctacaccaacgtctgcagatacacgaactggatccaaaaaaccattcaggccaagtgaccctgacatgtgacatctacctcccgacctaccaccccactggctggttccagaacgtctctcacctagaccttgcctcccctcctctcctgcccagctctgaccctgatgcttaataaacgcagcgacgtgagggtcctgattctccctggttttaccccagctccatccttgcatcactggggaggacgtgatgagtgaggacttgggtcctcggtcttacccccaccactaagagaatacaggaaaatcccttctaggcatctcctctccccaacccttccacacgtttgatttcttcctgcagaggcccagccacgtgtctggaatcccagctccgctgcttactgtcggtgtccccttgggatgtacctttcttcactgcagatttctcacctgtaagatgaagataaggatgatacagtctccataaggcagtggctgttggaaagatttaaggtttcacacctatgacatacatggaatagcacctgggccaccatgcactcaataaagaatgaattttattatg

SEQ ID NO: 421 - DNA, 3918 bp, Homo sapiens
ttttttttggttgaaacccagtttattagaccagaggcatgcgtcacccagagccctgcctgctgttcccctatccaatgcacactttttggcctcattcctgcttccctctggggaggtatgatctctgaggaaactcttaggaaccaagagattccaaagatcctacagccttactctccagctccaggccaatgcagctgctcacaggtcctgttctgggattgaagaccaagacacagctagggaaggaaggcctgaagaggggttggggctcaggcctggaaggagtgtctggtggagggagggggggcaggccctccacctcacttgtctctcattaagatagggtgagacaacagcagagctttcaactcctcctctaggcctctctttcctcccaaacccacctcaccagaaaataaaagtggtgggcttgggtatcaggtgaggaaagggggctgggcacccagaaggaggaaaggccactgactgaggacctcagcttctgcctgtcagcatcccactgccccaacttcaggagtcgccaatccccagctcccttctgtctctgacacacttggcttagtgtccagggtagacctccatcccctgggtgggggctatctctacagcaaccccttccctggggatgccactgtcagctgggcagagggcaatgggataggaggagcaggggaagagaatgttaaggctgcagggagggccgagggtgcccgggttgggggagagggtgaggccagaaagaggcagagcttgtgattcacagcttcctttgtcgccactgagacagtgcaaaggttacaatgcgcgtgtcgtctccttgtgcttctcagagggatgtgtgtacacagtacagacaccaggggagagagtccaactctttatacaggcaaggcattcagagaccagggagggagtagaaacatagaaggtggaacttggggtgggagaatggttctcagagacaagaggggatggggtggagacagacagggctgggaaagtatatacagagatatagcaatatagagtctgtatcatatagaaatagaaaatgcagatgaggttgttgagagaagcaaatgaagttggggaagaggatgtgggagagttccataagaaaatttatggacgtggccctctacaagggcctccgggagagggaccagtgaggttaggcactagcgcccttctccctgagctggacgctaaccagccggtctttaatgggatggtgaggaagggctgcctcttgggatttctctccagcagctgtggggtgggggtgaacttataggtatcaggatgtagcctacagcaccagggccgcatcttgtccccattaccacttcttaaggggatccccgacccccacgagattccacatggtgtgagagagtggggctgaggttttagttcctgccaggagacttgggtttggggacagtcactgggctgagagggtctcttaaggctggggaagcctccctcccccacactagccctcccccttaaggtacattctctggtttggggccaaattccagaccccagagatcccttccacccctcactgggaagggcctttggtgactggtggcagcagaatgtagatggacactcagatggcagacagctagatagacagaattcaggctgggagctaggggaggcagcatggaggagagaggggcagcctgaggtcccttgccccgttctccctttttagttcttttttagattagttttgttaaatgtaaaagaatgggatagaggcagagagaggactctatggtcaagactccttccttaccacagacaagaggaaagatctgccccggagtgtggggagtcccagggcagatgtgaggaggcagctgggggccccccgctctcctagtcctccccatctaggcctttggttcagcggcctgcggggctcagcaggtaaagtcctcgaacgtgcctcgggccggatggtgaggtaggatgttggcagcgtatgtcatcccggcagggtggccccgaaggctctcgcacgggttgtgtcttttgacgtcgtccaggctgagggccacgcccttgtccgcactgctccttttggcctccttctggcattttcctcgtcggcacagcttgtgcttaatgacctcgtaggcgtagtcaaagagctccagcaccgtgaggatgctggccccgatgaacagccccatctggcccccgatgtcaccaagacaacagggtttggggaagggcctctggggtggaggaccctcatgggacagaagtgagcaccctgcttttggatgatagggagccacgccatgcccatggcatgagaaggggacaggtgtcatcagcagctcacccaggagccctgcaatctcataggccttcttctgttcaatggtctcatagttgaggacttcaaagaaaatgtccagcaccaggatgttctcccctatgtattgctcagatttgttgaacttcttggccaggtacttggctgaggctttgctggggatcttgaccatggacagctctttgccatagcgggtcaggttgcaaggcatttcacacacgcagtactcctggtccttctccaccaggaagtccagagcaggatctgcacactccttgtactgctctggagtacagtatggggcatcccctggcatgtgcaccatgcggcagttgcagttctccaccaggtagcgcgtctcacagtcgatgcggcaggcagtgatgctgtaggagtcgaagaaatccaaatccgagtccatggtaacagctttgcaggtgccccagggtgggggcaggtagatgagccgctgctcctggcaggccacaaaggtctggaagcctggggccacgccaaagcccagctggtcgatgaaaggaggttcatcctgactatggatctgcactttgatgcctgcttcgaaggacgtctcgtcagtctccccccacacaggcaggtactcgtcctgctggatgtccagcatgatttccagcccattgcccgtcccatccttcatggtcttcagccgcggccgcccatctcggcccgagttgaacgtgtagcactttccatagcgtgtgaagaccaccttgaagtcttcagcgctgcagacctccccccggaagtggcaggagagcagcatgtctcgaatgtcgtgcccagctcggtcgtagaactcacgcatgttgaagggtttgggtttgaagctgcggaagttggctttgtcctgcagtatctccagctgcttttcatctgccatctgtgtgtctggtatctcatacctgttgttgagcagggccagcagctccccagcatgatacaggtcattcttggagacttggctaaagcggaactcgttgaggttgcacagcgtgacagcagggaaggtaagctgagaggcagccacctcgtcgagcttggtgacatggtggtagtggaagtagtactgcacacgctccgtgcacacacacagcagcacagccagcgagcccaggaagcacagggcccacagtgcccgcttcagagacagccgctcgtaggagaagatgtgggccaggccgtgcagtgtggagctgctggcgaaggcctggatgctcaccggctggacgccacccacctcctcctcctcggccttcagttccatccttgttgaggggatcctgagggggcttcggcaagccggcagccggcggcgggtcctggggcgctggaccggtggcgggctcagcgccgagtcgcggaggggctcatggcccggggccggagcccgcggccgccgcggcacgccgcgcagagccctgcagggagcgccccgcccggccccgctcggctccgatctgtccgcccgcccgcgcgcgctggctcgctggctc

SEQ ID NO: 422 - DNA, 7827 bp, Homo sapiens
ggctcggcccgggcagccgccttctgagcccccgacccgaggcgccgagccgccgccgcccgatgggctgggccgtggagcgtctccgcagtcgtagctccagccgccgcgctcccagccccggcagcctcagcatcagcggcggcggcggcggcggcggcggcgtcttccgcatcgttcgccgcagcgtaacccggagccctttgctctttgcagaatggcccgcttcggagacgagatgccggcccgctacgggggaggaggctccggggcagccgccggggtggtcgtgggcagcggaggcgggcgaggagccgggggcagccggcagggcgggcagcccggggcgcaaaggatgtacaagcagtcaatggcgcagagagcgcggaccatggcactctacaaccccatccccgtccgacagaactgcctcacggttaaccggtctctcttcctcttcagcgaagacaacgtggtgagaaaatacgccaaaaagatcaccgaatggcctccctttgaatatatgattttagccaccatcatagcgaattgcatcgtcctcgcactggagcagcatctgcctgatgatgacaagaccccgatgtctgaacggctggatgacacagaaccatacttcattggaattttttgtttcgaggctggaattaaaatcattgcccttgggtttgccttccacaaaggctcctacttgaggaatggctggaatgtcatggactttgtggtggtgctaacgggcatcttggcgacagttgggacggagtttgacctacggacgctgagggcagttcgagtgctgcggccgctcaagctggtgtctggaatcccaagtttacaagtcgtcctgaagtcgatcatgaaggcgatgatccctttgctgcagatcggcctcctcctattttttgcaatccttatttttgcaatcatagggttagaattttatatgggaaaatttcataccacctgctttgaagaggggacagatgacattcagggtgagtctccggctccatgtgggacagaagagcccgcccgcacctgccccaatgggaccaaatgtcagccctactgggaagggcccaacaacgggatcactcagttcgacaacatcctgtttgcagtgctgactgttttccagtgcataaccatggaagggtggactgatctcctctacaatagcaacgatgcctcagggaacacttggaactggttgtacttcatccccctcatcatcatcggctccttttttatgctgaaccttgtgctgggtgtgctgtcaggggagtttgccaaagaaagggaacgggtggagaaccggcgggcttttctgaagctgaggcggcaacaacagattgaacgtgagctcaatgggtacatggaatggatctcaaaagcagaagaggtgatcctcgccgaggatgaaactgacggggagcagaggcatccctttgatggagctctgcggagaaccaccataaagaaaagcaagacagatttgctcaaccccgaagaggctgaggatcagctggctgatatagcctctgtgggttctcccttcgcccgagccagcattaaaagtgccaagctggagaactcgaccttttttcacaaaaaggagaggaggatgcgtttctacatccgccgcatggtcaaaactcaggccttctactggactgtactcagtttggtagctctcaacacgctgtgtgttgctattgttcactacaaccagcccgagtggctctccgacttcctttactatgcagaattcattttcttaggactctttatgtccgaaatgtttataaaaatgtacgggcttgggacgcggccttacttccactcttccttcaactgctttgactgtggggttatcattgggagcatcttcgaggtcatctgggctgtcataaaacctggcacatcctttggaatcagcgtgttacgagccctcaggttattgcgtattttcaaagtcacaaagtactgggcatctctcagaaacctggtcgtctctctcctcaactccatgaagtccatcatcagcctgttgtttctccttttcctgttcattgtcgtcttcgcccttttgggaatgcaactcttcggcggccagtttaatttcgatgaagggactcctcccaccaacttcgatacttttccagcagcaataatgacggtgtttcagatcctgacgggcgaagactggaacgaggtcatgtacgacgggatcaagtctcaggggggcgtgcagggcggcatggtgttctccatctatttcattgtactgacgctctttgggaactacaccctcctgaatgtgttcttggccatcgctgtggacaatctggccaacgcccaggagctcaccaaggacgagcaagaggaagaagaagcagcgaaccagaaacttgccctacagaaagccaaggaggtggcagaagtgagtcctctgtccgcggccaacatgtctatagctgtgaaagagcaacagaagaatcaaaagccagccaagtccgtgtgggagcagcggaccagtgagatgcgaaagcagaacttgctggccagccgggaggccctgtataacgaaatggacccggacgagcgctggaaggctgcctacacgcggcacctgcggccagacatgaagacgcacttggaccggccgctggtggtggacccgcaggagaaccgcaacaacaacaccaacaagagccgggcggccgagcccaccgtggaccagcgcctcggccagcagcgcgccgaggacttcctcaggaaacaggcccgctaccacgatcgggcccgggaccccagcggctcggcgggcctggacgcacggaggccctgggcgggaagccaggaggccgagctgagccgggagggaccctacggccgcgagtcggaccaccacgcccgggagggcagcctggagcaacccgggttctgggagggcgaggccgagcgaggcaaggccggggacccccaccggaggcacgtgcaccggcaggggggcagcagggagagccgcagcgggtccccgcgcacgggcgcggacggggagcatcgacgtcatcgcgcgcaccgcaggcccggggaggagggtccggaggacaaggcggagcggagggcgcggcaccgcgagggcagccggccggcccggggcggcgagggcgagggcgagggccccgacgggggcgagcgcaggagaaggcaccggcatggcgctccagccacgtacgagggggacgcgcggagggaggacaaggagcggaggcatcggaggaggaaagagaaccagggctccggggtccctgtgtcgggccccaacctgtcaaccacccggccaatccagcaggacctgggccgccaagacccacccctggcagaggatattgacaacatgaagaacaacaagctggccaccgcggagtcggccgctccccacggcagccttggccacgccggcctgccccagagcccagccaagatgggaaacagcaccgaccccggccccatgctggccatccctgccatggccaccaacccccagaacgccgccagccgccggacgcccaacaacccggggaacccatccaatcccggcccccccaagacccccgagaatagccttatcgtcaccaaccccagcggcacccagaccaattcagctaagactgccaggaaacccgaccacaccacagtggacatccccccagcctgcccaccccccctcaaccacaccgtcgtacaagtgaacaaaaacgccaacccagacccactgccaaaaaaagaggaagagaagaaggaggaggaggaagacgaccgtggggaagacggccctaagccaatgcctccctatagctccatgttcatcctgtccacgaccaacccccttcgccgcctgtgccattacatcctgaacctgcgctactttgagatgtgcatcctcatggtcattgccatgagcagcatcgccctggccgccgaggaccctgtgcagcccaacgcacctcggaacaacgtgctgcgatactttgactacgtttttacaggcgtctttacctttgagatggtgatcaagatgattgacctggggctcgtcctgcatcagggtgcctacttccgtgacctctggaatattctcgacttcatagtggtcagtggggccctggtagcctttgccttcactggcaatagcaaaggaaaagacatcaacacgattaaatccctccgagtcctccgggtgctacgacctcttaaaaccatcaagcggctgccaaagctcaaggctgtgtttgactgtgtggtgaactcacttaaaaacgtcttcaacatcctcatcgtctacatgctattcatgttcatcttcgccgtggtggctgtgcagctcttcaaggggaaattcttccactgcactgacgagtccaaagagtttgagaaagattgtcgaggcaaatacctcctctacgagaagaatgaggtgaaggcgcgagaccgggagtggaagaagtatgaattccattacgacaatgtgctgtgggctctgctgaccctcttcaccgtgtccacgggagaaggctggccacaggtcctcaagcattcggtggacgccacctttgagaaccagggccccagccccgggtaccgcatggagatgtccattttctacgtcgtctactttgtggtgttccccttcttctttgtcaatatctttgtggccttgatcatcatcaccttccaggagcaaggggacaagatgatggaggaatacagcctggagaaaaatgagagggcctgcattgatttcgccatcagcgccaagccgctgacccgacacatgccgcagaacaagcagagcttccagtaccgcatgtggcagttcgtggtgtctccgcctttcgagtacacgatcatggccatgatcgccctcaacaccatcgtgcttatgatgaagttctatggggcttctgttgcttatgaaaatgccctgcgggtgttcaacatcgtcttcacctccctcttctctctggaatgtgtgctgaaagtcatggcttttgggattctgaattatttccgcgatgcctggaacatcttcgactttgtgactgttctgggcagcatcaccgatatcctcgtgactgagtttgggaataacttcatcaacctgagctttctccgcctcttccgagctgcccggctcatcaaacttctccgtcagggttacaccatccgcattcttctctggacctttgtgcagtccttcaaggccctgccttatgtctgtctgctgatcgccatgctcttcttcatctatgccatcattgggatgcaggtgtttggtaacattggcatcgacgtggaggacgaggacagtgatgaagatgagttccaaatcactgagcacaataacttccggaccttcttccaggccctcatgcttctcttccggagtgccaccggggaagcttggcacaacatcatgctttcctgcctcagcgggaaaccgtgtgataagaactctggcatcctgactcgagagtgtggcaatgaatttgcttatttttactttgtttccttcatcttcctctgctcgtttctgatgctgaatctctttgtcgccgtcatcatggacaactttgagtacctcacccgagactcctccatcctgggcccccaccacctggatgagtacgtgcgtgtctgggccgagtatgaccccgcagcttgcggtcggattcattataaggatatgtacagtttattacgagtaatatctccccctctcggcttaggcaagaaatgtcctcatagggttgcttgcaagcggcttctgcggatggacctgcccgtcgcagatgacaacaccgtccacttcaattccaccctcatggctctgatccgcacagccctggacatcaagattgccaagggaggagccgacaaacagcagatggacgctgagctgcggaaggagatgatggcgatttggcccaatctgtcccagaagacgctagacctgctggtcacacctcacaagtccacggacctcaccgtggggaagatctacgcagccatgatgatcatggagtactaccggcagagcaaggccaagaagctgcaggccatgcgcgaggagcaggaccggacacccctcatgttccagcgcatggagcccccgtccccaacgcaggaagggggacctggccagaacgccctcccctccacccagctggacccaggaggagccctgatggctcacgaaagcggcctcaaggagagcccgtcctgggtgacccagcgtgcccaggagatgttccagaagacgggcacatggagtccggaacaaggcccccctaccgacatgcccaacagccagcctaactctcagtccgtggagatgcgagagatgggcagagatggctactccgacagcgagcactacctccccatggaaggccagggccgggctgcctccatgccccgcctccctgcagagaaccagaggagaaggggccggccacgtgggaataacctcagtaccatctcagacaccagccccatgaagcgttcagcctccgtgctgggccccaaggcccgacgcctggacgattactcgctggagcgggtcccgcccgaggagaaccagcggcaccaccagcggcgccgcgaccgcagccaccgcgcctctgagcgctccctgggccgctacaccgatgtggacacaggcttggggacagacctgagcatgaccacccaatccggggacctgccgtcgaaggagcgggaccaggagcggggccggcccaaggatcggaagcatcgacagcaccaccaccaccaccaccaccaccaccatcccccgccccccgacaaggaccgctatgcccaggaacggccggaccacggccgggcacgggctcgggaccagcgctggtcccgctcgcccagcgagggccgagagcacatggcgcaccggcagggcagtagttccgtaagtggaagcccagccccctcaacatctggtaccagcactccgcggcggggccgccgccagctcccccagaccccctccaccccccggccacacgtgtcctattcccctgtgatccgtaaggccggcggctcggggcccccgcagcagcagcagcagcagcagcagcagcagcaggcggtggccaggccgggccgggcggccaccagcggccctcggaggtacccaggccccacggccgagcctctggccggagatcggccgcccacggggggccacagcagcggccgctcgcccaggatggagaggcgggtcccaggcccggcccggagcgagtcccccagggcctgtcgacacggcggggcccggtggccggcatctggcccgcacgtgtccgaggggcccccgggtccccggcaccatggctactaccggggctccgactacgacgaggccgatggcccgggcagcgggggcggcgaggaggccatggccggggcctacgacgcgccaccccccgtacgacacgcgtcctcgggcgccaccgggcgctcgcccaggactccccgggcctcgggcccggcctgcgcctcgccttctcggcacggccggcgactccccaacggctactacccggcgcacggactggccaggccccgcgggccgggctccaggaagggcctgcacgaaccctacagcgagagtgacgatgattggtgctaagcccgggcgagggaattcgatatcaagcttatcgataccgtcgacctcgagggggggcccggtaccaattcgccctatagtgagtcgtatta

SEQ ID NO: 423 - DNA, 2687 bp, Homo sapiens
acggcgcgctgggctcacactgtcccgccgcggacgggctttgtggttgggggcgcgcgtgcgagtgccagtgagagtgtgggtgcgcgctgtgggccgcggcgcgggtgggtggccgtgcgttcttgcgagccggcctgcaggaggcgaggctcccctggcctcccgcacccagcggcggaccgagcccctggagggaagttgccgcagccgcccgggccgccggccctcctgtcccgcgccaggtacacagcttctcctagcatgacttcgatctgatcagcaaacaagaaaatttgtctcccgtagttctggggcgtgttcaccacctacaaccacagagctgtcatggctgccatctctacttccatccctgtaatttcacagccccagttcacagccatgaatgaaccacagtgcttctacaacgagtccattgccttcttttataaccgaagtggaaagcatcttgccacagaatggaacacagtcagcaagctggtgatgggacttggaatcactgtttgtatcttcatcatgttggccaacctattggtcatggtggcaatctatgtcaaccgccgcttccattttcctatttattacctaatggctaatctggctgctgcagacttctttgctgggttggcctacttctatctcatgttcaacacaggacccaatactcggagactgactgttagcacatggctccttcgtcagggcctcattgacaccagcctgacggcatctgtggccaacttactggctattgcaatcgagaggcacattacggttttccgcatgcagctccacacacggatgagcaaccggcgggtagtggtggtcattgtggtcatctggactatggccatcgttatgggtgctatacccagtgtgggctggaactgtatctgtgatattgaaaattgttccaacatggcacccctctacagtgactcttacttagtcttctgggccattttcaacttggtgacctttgtggtaatggtggttctctatgctcacatctttggctatgttcgccagaggactatgagaatgtctcggcatagttctggaccccggcggaatcgggataccatgatgagtcttctgaagactgtggtcattgtgcttggggcctttatcatctgctggactcctggattggttttgttacttctagacgtgtgctgtccacagtgcgacgtgctggcctatgagaaattcttccttctccttgctgaattcaactctgccatgaaccccatcatttactcctaccgcgacaaagaaatgagcgccacctttaggcagatcctctgctgccagcgcagtgagaaccccaccggccccacagaaggctcagaccgctcggcttcctccctcaaccacaccatcttggctggagttcacagcaatgaccactctgtggtttagaacggaaactgagatgaggaaccagccgtcctctcttggaggataaacagcctccccctacccaattgccagggcaaggtggggtgtgagagaggagaaaagtcaactcatgtacttaaacactaaccaatgacagtatttgttcctggaccccacaagacttgatatatattgaaaattagcttatgtgacaaccctcatcttgatccccatcccttctgaaagtaggaagttggagctcttgcaatggaattcaagaacagactctggagtgtccatttagactacactaactagacttttaaaagattttgtgtggtttggtgcaagtcagaataaattctggctagttgaatccacaacttcatttatatacaggcttcccttttttatttttaaaggatacgtttcacttaataaacacgtttatgcctatcagcatgtttgtgatggatgagactatggactgcttttaaactaccataattccattttttcccttacataggaaaactgtaagttggaattatcttttgtttagaaagcatgcatgtaatgtatgtatgcagtatgccttacttaaaaagattaaaaggatactaatgttaaatcttctaggaaatagaacctagacttcaaagccagtatttgtttaggtcatgaagcaaacaatgctctaatcacaatattaactgtttaattaaaatgttgtaacaagtataaaacagggaatgtaagtttattaccaaagtgatatgtattccaaaaaagtcatagaagatgaagcactataatattgttcccatatatttaaaatacccaagtacattctaattaccagtatatcagaggaaaattttcgtagtctttgtaaaataatatactcatcatagaaaacttgaaaaatgcagaaatgtataaaaaagcaaaaatgattactgataatatcacaacccagaagtaaccacctttaaaaagcaacccccatgtatgcctatatgtgtattgtatactttttttacataattggagtcatactgtaaacagttttataagtagatctttttcattgcaaaattgccacattttcttatggcattaaaaattttacaaaaacataattttaatggctatattatattccatttaatggatgcaactcagtttatttaaccattcccatgttgttaactatttaggttgtttctaattttcattattataaagttgcagaaatttggtgt

SEQ ID NO: 424 - DNA, 622 bp, Homo sapiens
gataaaagtggaatgaggaatgcagccgttctgaacaccaccctccatttcattctggaaccgggaaggtacacccaggcatgacaatagcttctctcctcacagaaatttaactgatttcttcattctccatttagcaaggtcatggaagatttggaggaaacattatttgaagaatttgaaaactattcctatgacctagactattactctctggagtctgatttggaggagaaagtccagctgggagttgttcactgggtctccctggtgttatattgtttggcttttgttctgggaattccaggaaatgccatcgtcatttggttcacggggttcaagtggaagaagacagtcaccactctgtggttcctcaatctagccattgcggatttcatttttcttctctttctgcccctgtacatctcctatgtggccatgaatttccactggccctttggcatctggctgtgcaaagccaattccttcactgcccagttgaacatgtttgccagtgtttttttcctgacagtgatcagcctggagcactatattcacttgatccatcctgtcttatctcatcggcatcgaaacctcaagaactctctgattgtcattatat

SEQ ID NO: 425 - DNA, 1560 bp, Homo sapiens
gcaagatacagtgagtcttaaagttaagcaccgtgcaattagctttgcttccttgggtttttgaaacatgcatctgtataaacctgcctgtgcagacatcccgagccccaagctgggtctgccaaaatccagtgaatcggctctaaaatgtagatggcacctagcagtgaccaagactcagcctcaggcggcctgcaaacctgtgaggcccagtggagcagccgaacagaaatatgtggaaaagtttctacgtgttcatggaatttcgttgcaggaaaccaccagagcagagacgggcatggcatacaggaatcttggaaaatcaggactcagagtttcttgcttgggtcttggaacatgggtgacatttggaggtcaaatttcagatgaggttgctgaacggctgatgaccatcgcctatgaaagtggtgttaacctctttgatactgccgaagtctatgctgctggaaaggctgaagtgattctggggagcatcatcaagaagaaaggctggaggaggtccagtctggtcataacaaccaaactctactggggtggaaaagctgaaacagaaagagggctgtcaagaaagcatattattgaaggattgaagggctccctccagaggctgcagctcgagtatgtggatgtggtctttgcaaatcgaccggacagtaacactcccatggaagaaattgtccgagccatgacacatgtgataaaccaaggcatggcgatgtactggggcacctcgagatggagtgctatggagatcatggaagcctattctgtagcaagacagttcaatatgatcccaccggtctgtgaacaagctgagtaccatcttttccagagagagaaagtggaggtccagctgccagagctctaccacaaaataggtgttggcgcaatgacatggtctccacttgcctgtggaatcatctcaggaaaatacggaaacggggtgcctgaaagttccagggcttcactgaagtgctaccagtggttgaaagaaagaattgtaagtgaagaagggagaaaacagcaaaacaagctaaaagacctttccccaattgcggagcgtctgggatgcacactacctcagctagctgttgcgtggtgcctgagaaatgaaggtgtgagttctgtgctcctgggatcatccactcctgaacaactcattgaaaaccttggtgccattcaggttctcccaaagatgacatcacatgtggtaaatgagattgataacatactgcgcaacaagccctacagcaagaaggactatagatcataaggcaatgcatgaaccacagaagctgcatggttaaaatagcggcctgtgcccagtacagaaaggtgttactaaccagtcttttgaatcacttagcagcttgctgcaacctctagtgtccctccctggattctttgaggtgtctgactgtcgctaccactgtgcacatctgaaaactcacaaccaagaaaatccattctattttcttatcttggactggagtcacctattattgcattgctgtatacacctcatgcttatgcaatggg

SEQ ID NO: 426 - DNA, 2812 bp, Homo sapiens
gacttcaatcatcacccaaatgttgctaactcccaaaggcctgcctccatccagacctatcttccagagctccccactcacaggcacaggagtcactacgtcagcatttactgtgtaccgttttaggggctggtctgcagtgaaccagactgcctgtgtccatggagcttagaagaagtgggaagagcattatcaggctacgaagacagagtggggtaaaacagcagagatcaatgagatcagagcacaccctcggaggaagggatacatgacaaatgcctgaacggagagagggagtgaactgtgcaaacacacagccaggagttttccaaggacagggaggagaaagtataaggcctgctgtaccctcgatgcaaaacatgagaaagccgactgtgccagtcccagccgccctaccgccgtgggaacgatgctgtaatggactgtgttggttggcctccaggcaggaagtggcacttggaaaagaacaccagctgcggtggtagcagtgggatttgtgcttcttatgttacccagatggcagatgatcagggctgtattgaagagcagggggttgaggattcagcaaatgaagattcagtggatgctaagccagaccggtcctcgtttgtaccgtccctcttcagtaagaagaagaaaaatgtcaccatgcgatccatcaagaccacccgggaccgagtgcctacatatcagtacaacatgaattttgaaaagctgggcaaatgcatcataataaacaacaagaactttgataaagtgacaggtatgggcgttcgaaacggaacagacaaagatgccgaggcgctcttcaagtgcttccgaagcctgggttttgacgtgattgtctataatgactgctcttgtgccaagatgcaagatctgcttaaaaaagcttctgaagaggaccatacaaatgccgcctgcttcgcctgcatcctcttaagccatggagaagaaaatgtaatttatgggaaagatggtgtcacaccaataaaggatttgacagcccactttaggggggatagatgcaaaacccttttagagaaacccaaactcttcttcattcaggcttgccgagggaccgagcttgatgatggcatccaggccgactcggggcccatcaatgacacagatgctaatcctcgatacaagatcccagtggaagctgacttcctcttcgcctattccacggttccaggctattactcgtggaggagcccaggaagaggctcctggtttgtgcaagccctctgctccatcctggaggagcacggaaaagacctggaaatcatgcagatcctcaccagggtgaatgacagagttgccaggcactttgagtctcagtctgatgacccacacttccatgagaagaagcagatcccctgtgtggtctccatgctcaccaaggaactctacttcagtcaatagccatatcaggggtacattctagctgagaagcaatgggtcactcattaatgaatcacatttttttatgctcttgaaatattcagaaattctccaggattttaatttcaggaaaatgtattgattcaacagggaagaaactttctggtgctgtcttttgttctctgaattttcagagactttttttataatgttattcatttggtgactgtgtaactttctcttaagattaattttctctttgtatgtctgttaccttgttaatagacttaatacatgcaacagaagtgacttctggagaaagctcatggctgtgtccactgcaattggtggtaacagtggtagagtcatgtgtgcacttggcaaaaagaatcccaatgtttgacaaaacacagccaaggggatatttactgctctttattgcagaatgtgggtattgagtgtgatttgaatgatttttcattggcttagggcagattttcatgcaaaagttctcatatgagttagaggagaaaaagcttaatgattctgatatgtatccatcaggatccagtctggaaaacagaaaccattctaggtgtttcaacagagggagtttaatacaggaaattgacttacatagatgataaaagagaagccaaacagcaagaagctgttaccacacccagggctatgaggataatgggaagaggtttggtttcctgtgtccagtagtgggatcatccagaggagctggaaccatggtgggggctgcctagtgggagttaggaccaccaatggattgtggaaaatggagccatgacaagaacaaaaccactgactgagatggagtgagctgagacagataagagaataccttggtctcacctatcctgccctcacatcttccaccagcaccttactgcccaggcctatctggaagccacctcaccaaggaccttggaagagcaagggacagtgaggcaggagaagaacaagaaatggatgtaagcctggcccataatgtgaacataagtaatcactaatgctcaacaatttatccattcaatcatttattcattgggttgtcagatagtctatgtatgtgtaaaacaatctgttttggctttatgtgcaaaatctgttatagctttaaaatatatctggaactttttagattattccaagccttattttgagtaaatatttgttacttttagttctataagtgaggaagagtttatggcaaagatttttggcactttgttttcaagatggtgttatcttttgaattcttgataaatgactgtttttttctgcctaatagtaactggttaaaaaacaaatgttcatatttattgattaaaaatgtggttgcttaattcct

SEQ ID NO: 427 - DNA, 2606 bp, Homo sapiens
ggaggctgtctcctgtgtagtgtatatttatctgtaagtgagccgttggggaaggattgaatacagagacgctgtctgcttgctgccttaagacagctagctgaattgctgattaacttttaaaatacccagcttggtttatttttcttagaatctgttgctaagactggggacgctgttttcttttacaaagggaaatctaagttaatttcaaggcattcgaaatggggaaagactattattgcattttgggaattgagaaaggagcttcagatgaagatattaaaaaggcttaccgaaaacaagccctcaaatttcatccggacaagaacaaatctcctcaggcagaggaaaaatttaaagaggtcgcagaagcttatgaagtattgagtgatcctaaaaagagagaaatatatgatcagtttggggaggaagggttgaaaggaggagcaggaggtactgatggacaaggaggtaccttccggtacacctttcatggcgatcctcatgctacatttgctgcatttttcggagggtccaacccctttgaaattttctttggaagacgaatgggtggtggtagagattctgaagaaatggaaatagatggtgatccttttagtgcctttggtttcagcatgaatggatatccaagagacaggaattctgtggggccatcccgcctcaaacaagatcctccagttattcatgaacttagagtatcacttgaagagatatatagtggttgtaccaaacggatgaagatttctcgaaaaaggctaaacgctgatggaaggagttacagatctgaggacaaaattcttaccattgagattaaaaaagggtggaaagaaggcaccaaaattacttttccaagagaaggagatgaaacaccaaatagtattccagcagacattgtttttatcattaaagacaaagatcatccaaaatttaaaagggatggatcaaatataatttatactgctaaaattagtttacgagaggcattgtgtggctgctcaattaatgtaccaacactggatggaagaaacatacctatgtcagtaaatgatattgtgaaacccggaatgaggagaagaattattggatatgggctgccatttccaaaaaatcctgaccaacgtggtgaccttctaatagaatttgaggtgtccttcccagatactatatcttcttcatccaaagaagtacttaggaaacatcttcctgcctcatagaatgaagaactttgttacacatattttgataaggcactgaaaatataaaaggactggtagtttactgatgtagatgtgaattctgtataaagatgtgtaaattcttttgagggttcattaaattgcatgaatagagacgggtcaaataaataggcaaaagggatttttacagttagagataaaagagaaaaccattcactgtattttatttcatttctcctgattcagatatttttagtaatttgcttatatgtaaaagttgtttttgtggagtcagtggatatatttctaatgaagtgctagactatccaattacttaatttcttatacctttagataatcagtatgaaaagttcccatttataatggaaatgaaaattcttaactaaactatacatgtaatatgtatttctagaagagaataaaaacccaagtcagttattagatttaaatcaccttctgaaatgctgctatagggctggtatctgtaaaagaatatcctgatgcatctgtttcaccattttgatttttaaagtatgctgtagcatttcttaataacatcgttgtgatgttcttaaggcagatctttcttcataaaaaggaaagtaatggcaatttctctcctgtggaaatcccaattgcttgaattactgatattttagaatagactttttaaaatgccatatgtaattttatgcaagttgactatatatcttgtacttaataaattataggctcattttgttctctgctagtttaaagtaattcgtttaataatagatgtgtttttagaggaaatgctgttacttggaattaattttccagttatacagtcttctataacttactaataatattctatatgtactttatgtaatttccctaaaaagaatgaactaccactacactatggtgttaaaccaaaatatagggaaaataaacactaactgctgcttatggataatgttgcaactacttgttatgcatataaatattttactttttcacatgtatagattgcatttcttaggtgttttaattttttaaatatatttatgttttaaaaatttagttttgttttctgttttataactatagtgagaatgatgttttgaagcaaaatttttggttataaaatagttttcaggattatatatatatatactggatcctatcgccttttagtagaatatgaaatattcttttagaaatccaatataaataggttataatagccatattctttattactttattgagatataatttacatgccataaagtttacccttaaaatagataattcagtggtttttagtgatatttacaaagtggtacaatcatcatcactttctaattccagaatatt

SEQ ID NO: 428 - DNA, 2246 bp, Homo sapiens
gccgcgtgcagaggtgctcaagcctcctgcgcggtccgcagtcagtgccgccgcgcccggcctcccgcacgccccgcaggtagcgcccccgcccgcggcccagagtgcgctcgcgccggcaccagctcccggataaacggcgcgccgcgcggagatgacagccgaggagatgaaggcgaccgagagcggggcgcagtcggcgccgctgcccatggagggagtggacatcagccccaaacaggacgaaggcgtgctgaaggtcatcaagagagagggcacaggtacagagatgcccatgattggggaccgagtctttatccactacactggctgggctattagatggcacaaagtttgactccagtctggatcgcaaggacaaattctcctttgacctgggaaaaggggaggtcatcaaggcttgggacattgccatagccaccatgaaggtgggggaggtgtgccacatcacctgcaaaccagaatatgcctacggttcagcaggcagtcctccaaagattccccccaatgccacgcttgtatttgaggtggagttgtttgagtttaagggagaagatctgacggaagaggaagatggcggaatcattcgcagaatacagactcgcggtgaaggctatgctaagcccaatgagggtgctatcgtggaggttgcactggaagggtactacaaggacaagctctttgaccagcgggagctccgctttgagattggcgagggggagaacctggatctgccttatggtctggagagggccattcagcgcatggagaaaggagaacattccatcgtgtacctcaagcccagctatgcttttggcagtgttgggaaggaaaagttccaaatcccaccaaatgctgagctgaaatatgaattacacctcaagagttttgaaaaggccaaggagtcttgggagatgaattcagaagagaagctggaacagagcaccatagtgaaagagcggggcactgtgtacttcaaggaaggtaaatacaagcaagctttactacagtataagaagatcgtgtcttggctggaatatgagtctagtttttccaatgaggaagcacagaaagcacaggcccttcgactggcctctcacctcaacctggccatgtgtcatctgaaactacaggccttctctgctgccattgaaagctgtaacaaggccctagaactggacagcaacaacgagaagggcctcttccgccggggagaggcccacctggccgtgaatgactttgaactggcacgggctgatttccagaaggtcctgcagctctaccccaacaacaaagccgccaagacccagctggctgtgtgccagcagcggatccgaaggcagcttgcccgggagaagaagctctatgccaatatgtttgagaggctggctgaggaggagaacaaggccaaggcagaggcttcctcaggagaccatcccactgacacagagatgaaggaggagcagaagagcaacacggcagggagccagtctcaggtggagacagaagcatagcccctctccaccagccctactcctgcggctgcctgccccccagtctccccactccaccctgttagttttgtaaaaactgaagaattttgagtgaattagacctttatttttctatctggttggatggtggctttaggggaagggggaaaggtgtaggctgggggattgaggtggggaatcattttagctggtgtcagcccctcttcccttcctccattgcacatgaacatatgtccatccatatatattcatcagaatgttaatttattttgctccctctgttaggtccattttctaagggtagaagaggcaagtggtagggatgaggtctgataagaacccagggtggagagggagactcctgggcagccgttttcctcatcctttccctctcccagtccatttccaaatgtggcctccatgtgggtgctagggacatgggaaaaaccactgctatgccatttcttctctctgttcccttcctcacccccgacggtgtggctgatgatgtcttctggtgtcatggtgaccaccccctgttccctgttctggtatttcccctgtcagtttcccctctcggccaggttgtgtcccaaaatcccctcagcctcttctctgcacgttgctgaaggtccaggcttgcctcaagttccatgcttgagcaataaagtggaaacaataaaacctgggtgtcagacaaccctttctgtt

SEQ ID NO: 429 - DNA, 2988 bp, Homo sapiens
catcacctttttttaagtagtaagaataaagccactgtatgattctcttaatagctatacattaatcctgtttttagtgctgactgggccagccttccgggaactggagtctgtctctttcagtgcttttttgttttttgttggttttttcgagacggggtcgatcacggctcaccacagccttaacctccagggctccagcaatcctcccacctcagcctcctgagtagctgggaccacaggtgtgtgccaccatctccagcagtttgtttatttattttttctttttttttttttggtagaaatgggcttttcgcccatgttgcccaagctggtcttgcacttctgggctgaagcaatcctctcgccttggcctcccagagccttgggattacagaatcatgggtgagagctggcatggcccctagaggtcatttggggtccagctgcctcaccgtatcaatgaggaaactgaggcccagaaaagaaaagcatttttgcccagagtccctcagaaaaaaacagaccacatctgatccttggccctgagtccagagtgggaggcaccgtgacaacaatgcgcagagcagggaatgcagggagccatggatagtgctggggtgcctcaggaaccctgaagctgggctgagccatgatgctgctgccagaacccctgcagagggcctggtttcaggagactcagagtcctctgtgaaaaagcccttggagagcgccccagcagggctgcacttggctcctgtgaggaaggggctcaggggtctgggcccctccgcctgggccgggctgggagccaggcgggcggctgggctgcagcaatggaccgtgagctggcccagcccgcgtccgtgctgagcctgcctgtcgtctgtggcatgcccatcatgggctcctcggtgtacatcacggtggagctggccattgctgtgctggccatcctgggcaatgtgctggtgtgctgggccgtgtggctcaacagcaacctgcagaacgtcaccaactactttgtggtgtcactggcggcggccgacatcgcagtgggtgtgctcgccatcccctttgccatcaccatcagcaccgggttctgcgctgcctgccacggctgcctcttcattgcctgcttcgtcctggtcctcacgcagagctccatcttcagtctcctggccatcgccattgaccgctacattgccatccgcatcccgctccggtacaatggcttggtgaccggcacgagggctaagggcatcattgccatctgctgggtgctgtcgtttgccatcggcctgactcccatgctaggttggaacaactgcggtcagccaaaggagggcaagaaccactcccagggctgcggggagggccaagtggcctgtctctttgaggatgtggtccccatgaactacatggtgtacttcaacttctttgcctgtgtgctggtgcccctgctgctcatgctgggtgtctatttgcggatcttcctggcggcgcgacgacagctgaagcagatggagagccagcctctgccgggggagcgggcacggtccacactgcagaaggaggtccatgctgccaagtcactggccatcattgtggggctctttgccctctgctggctgcccctacacatcatcaactgcttcactttcttctgccccgactgcagccacgcccctctctggctcatgtacctggccatcgtcctctcccacaccaattcggttgtgaatcccttcatctacgcctaccgtatccgcgagttccgccagaccttccgcaagatcattcgcagccacgtcctgaggcagcaagaacctttcaaggcagctggcaccagtgcccgggtcttggcagctcatggcagtgacggagagcaggtcagcctccgtctcaacggccacccgccaggagtgtgggccaacggcagtgctccccaccctgagcggaggcccaatggctatgccctggggctggtgagtggagggagtgcccaagagtcccaggggaacacgggcctcccagacgtggagctccttagccatgagctcaagggagtgtgcccagagccccctggcctagatgaccccctggcccaggatggagcaggagtgtcctgatgattcatggagtttgccccttcctaagggaaggagatctttatctttctggttggcttgaccagtcacgttgggagaagagagagagtgccaggagaccctgagggcagccggttcctactttggactgagagaagggagccccaggctggagcagcatgaggcccagcaagaagggcttgggttctgaggaagcagatgtttcatgctgtgaggccttgcaccaggtgggggccacagcaccagcagcagcatctttctgggcaggcccagccctccactgcagaagcatctggaagcaccaccttgtctccacagagcagcttgggcacagcagactggcctggccctgagactggggagtggctccaacagcctcctgccacccacacaccactctccctagactctcctagggttcaggagctgctgggcccagaggtgacatttgacttttttccaggaaaaatgtaagtgtgaggaaaccccttttattttattacctttcactctctggctgctgggtctgccgtcggtcctgctgctaacctggcagcagagcctctgcccggggagcctcaggcagtcctctcctgctgtcacagctgccatccacttctcagtcccagggccatctcttggagtgacaaagctgggatcaaggacagggagttgtaacagagcagtgccagagcatgggcccaggtcccaggggagaggttggggctggcaggccactggcatgtgctgagtagcgcagagctacccagtgagaggccttgtctaactgcctttccttctaaagggaatgtttttttctgagataaaataaaaacgagccacatcgtgttttaag

SEQ ID NO: 430 - DNA, 4602 bp, Homo sapiens
  modified_base (3432): a, t, c, g, other or unknown
accagaggtttcccagagaggaaggcgtggctccctcccgggccagtgagccctggcgccgccgcggccgcggtcccagcagcggagtagggcggcggctgcgccccgcaccatggggggcagcccagccccagccgcggtaaacgccgacctccgccgccgcccgcgcccgtctgccccctcccgctgcggctctctggacgccatcccctcctcacctcgaagccaacatgaaggagacccggggctacggaggggatgcccccttctgcacccgcctcaaccactcctacacaggcatgtgggcgcccgagcgttccgccgaggcgcggggcaacctcacgcgccctccagggtctggcgaggattgcggatcggtgtccgtggccttcccgatcaccatgctgctcactggtttcgtgggcaacgcactggccatgctgctcgtgtcgcgcagctaccggcgccgggagagcaagcgcaagaagtccttcctgctgtgcatcggctggctggcgctcaccgacctggtcgggcagcttctcaccaccccggtcgtcatcgtcgtgtacctgtccaagcagcgttgggagcacatcgacccgtcggggcggctctgcacctttttcgggctgaccatgactgttttcgggctctcctcgttgttcatcgccagcgccatggccgtcgagcgggcgctggccatcagggcgccgcactggtatgcgagccacatgaagacgcgtgccacccgcgctgtgctgctcggcgtgtggctggccgtgctcgccttcgccctgctgccggtgctgggcgtgggccagtacaccgtccagtggcccgggacgtggtgcttcatcagcaccgggcgagggggcaacgggactagctcttcgcataactggggcaaccttttcttcgcctctgcctttgccttcctggggctcttggcgctgacagtcaccttttcctgcaacctggccaccattaaggccctggtgtcccgctgccgggccaaggccacggcatctcagtccagtgcccagtggggccgcatcacgaccgagacggccattcagcttatggggatcatgtgcgtgctgtcggtctgctggtctccgctcctgataatgatgttgaaaatgatcttcaatcagacatcagttgagcactgcaagacacacacggagaagcagaaagaatgcaacttcttcttaatagctgttcgcctggcttcactgaaccagatcttggatccttgggtttacctgctgttaagaaagatccttcttcgaaagttttgccaggtagcaaatgctgtctccagctgctctaatgatggacagaaagggcagcctatctcattatctaatgaaataatacagacagaagcatgaaagaaaacacttaacttgcatgtgcacagcttttggtaacaaatatcgctaaaccttactgtgaatttaggcatctctggcatgccactgtttatgcattgaagtggaatttttggtataaagctaaatggtcttagaagcatagaaaatccctatgtgccaaaagtagtgaaacacaaacaaaggaaaatatattaataacagtctagtgtttttgttgagtctgccattcgtagctgaatatgtgattaattatgtgatgaaaacattttttataaatgatcttggtctattggggagcggggatagttaatattccagtacactgaatacatgaggaatttaaccacatacatcattgaagacaagggatagcagtttgtttttattcaaagacattgctgtgttctctttcattgcctctctcgctttctgtcacttttttcctccttacattaaagaaaagtttaattacagttaaaaatgtataatgtatttataatattcatcgataccattattcaaatattgctcaatacagcaaattagctcctaacctaacaaagtttaagtttacttggattgataattaggtttactctttatctgaataagaaccaattccatttgtttgaaatatggagtttgtgactacccaaattgctaattattctttcttttgaatatattttacatttctatgagcctaaggaagattcatgaaactgacctatgagagtcgtgaagtggtttttcagaatgctatgtaaggaccgatttgagcactaactataggtactctgaatatatatttcccttgattattcaccaaaagtgttccccagtctttgactctttaaattccaatactgattccaaaacaaataaatattttgaagactcaatgaatactttccatattttggcctatttatataagaaagttaataacattgacccttcacagctcttctgcctgctcctcaaagtggctctatctaaatatttattactaaaatgtttttcctacagtctacatgaatacaaacctcaatagctaagcttgacgtatttgtgcacaagtagatcactacattaagttttgggaattgcacttcttaaaaatgtctccccaccaaacatagtaatcctgtagttatgcctacacaaagcttgccatattctttggtcgattcattttgtaaacccattaactttttattgtgaagattttcatttgcagtttcttgcactgcttttctagttttttaaaagcttgagatttatttatacttcttgtagtaactgcatatttctgtgtgtgtttagtggtaaagaattaattttgataggtacaatatgtctatcagattgatatatacaccagcctatgtcaattggggctaattattttaaatgaccatgtcaaattgaatttggagacaaaatctgttgagagtgcttatgtaattaatgatggttctactaactaaattttggaaaaggtgataaatagactatactaaaatctctctatgccatagaattggattatcctgtaggtcatctcattgggtctaagacaaaactacctactttttttcaaaagtgcactgaaatcacataataaagaggctttacctcttggttggtcctgtgaccctaagttctagtcagatagacacagaggcaatgtgaatttgagtggcatgagcatgattaggttattccttccagcatctagtatagcacctggaatatagaaactgtctaatacatatttattcagtgaatcaatgagcagaagtttgccaggacagtacacattggcaaggcacataccatatgattgaagtgcttcatgccattacagtccatcaggctgataaagtgaattatttctgattatttaattacagaaatatgaatttatcttcaaggggttagtgtcatactgctgtacaacacagtgctttatttatactaataatttaggagactgatacttccaaatgatagtggacattactatcanaagaatatcacttttcatcaaactgcaaaaatacagaaaggcaaaaaacctgacacttattcttaactgcaaattaaattcctgcccaggggatatattttaggtggggatgaatggcagcttttgtgttttttttaacaagcttgaaagggaggtggaaaacaaagaaattatgtaaatggcatatgagttttattatctaggcattcgttagtatggggaaacctgcataagcaactgaaaatcccaaatgatttcagccttttcatgatggttgaggttagatttcagagatgtacagagactagagcggtggttagaaagaggatatatgtagtcacagcagaaagacgtgtctaagtttaattttattggctttcaagttcactcatgtatacttagtttgtccatacatatgtctaatcaggaaaaatgcatgtatagattatgacaattcctgaattttgaagtattggttaaaagacaattaaaggccaagaaaaccatggtggaagaagtaagcgaatgaaatgtagaaatatatgtaaaattagcaagtgtcaattttaccaagtagtgttgattttccaaacaatgaatttatatactatgctgagtcacagagaagaatgatcacatgttacttaatgagagcagtttacttttcaaataaaataggtatgatgaatgtcttaaaaatatcttgaagttgaagaaacaaaaatgagttatctcaatatttaccaagttaacctagtgctgtatatatcccaagatattttaggtaaatgtaagtgtttaatcatgccagatttaaactagtctgaaatatagggtatacatatatttctacttacatttctttattttatgaaatatccgaccatgttgcagaaaataatgcaaaacctcatgtaagttaactatgaaagatcctgtgagcacattggcattgagtgacagacaaactaaaaactggcaaacagtattttaataagggggtcactctgtggcagtattctaatattggattttcaagtagattaggctttttatttattcaacgctttttataattttgttctttttgactccaaattattggtcagctttcaaccttctccacatcagcaatcactaatagttcttttggttgagatcaactcagaa

SEQ ID NO: 431 - DNA, 2118 bp, Homo sapiens
ggggaacagcgcagggaggtgggtagccgggctcccaggcacgtgggtctctgcggctgcggcgggacccgggcactggcacccgggagcggcggcgacggcaccccgagaggagaagcgcagcgcagtggcgagaggagccccttgtggcagcagcactacctgcccagaaaaatgctggaggctgggcgtggccccaggcctggggacctgtttttcctgtttcccgcagagttccctgcagcccggtccaggtccaggcgtgtgcattcatgagtgaggaacccgtgcaggcgctgagcatcctgacctggagagcaggggctggtcagggcgatggcagcagacctgggcccctggaatgacaccatcaatggcacctgggatggggatgagctgggctacaggtgccgcttcaacgaggacttcaagtacgtgctgctgcctgtgtcctacggcgtggtgtgcgtgcttgggctgtgtctgaacgccgtggcgctctacatcttcttgtgccgcctcaagacctggaatgcgtccaccacatatatgttccacctggctgtgtctgatgcactgtatgcggcctccctgccgctgctggtctattactacgcccgcggcgaccactggcccttcagcacggtgctctgcaagctggtgcgcttcctcttctacaccaacctttactgcagcatcctcttcctcacctgcatcagcgtgcaccggtgtctgggcgtcttacgacctctgcgctccctgcgctggggccgggcccgctacgctcgccgggtggccggggccgtgtgggtgttggtgctggcctgccaggcccccgtgctctactttgtcaccaccagcgcgcgcgggggccgcgtaacctgccacgacacctcggcacccgagctcttcagccgcttcgtggcctacagctcagtcatgctgggcctgctcttcgcggtgccctttgccgtcatccttgtctgttacgtgctcatggctcggcgactgctaaagccagcctacgggacctcgggcggcctgcctagggccaagcgcaagtccgtgcgcaccatcgccgtggtgctggctgtcttcgccctctgcttcctgccattccacgtcacccgcaccctctactactccttccgctcgctggacctcagctgccacaccctcaacgccatcaacatggcctacaaggttacccggccgctggccagtgctaacagttgccttgaccccgtgctctacttcctggctgggcagaggctcgtacgctttgcccgagatgccaagccacccactgggccccagccctgccaccccggctcgccgcaggctgggcctgcgcagatccgacagaactgacatgcagaggatagaagatgtgttgggcagcagtgaggactctaggcggacagagtccacgccggctggtagcgagaacactaaggacattcggctgtaggagcagaacacttcagcctgtgcaggtttatattgggaagctgtagaggaccaggacttgtgcagacgccacagtctccccagatatggaccatcagtgactcatgctggatgaccccatgctccgtcatttgacaggggctcaggatattcactctgtggtccagagtcaactgttcccataacccctagtcatcgtttgtgtgtataagttgggggaattaagtttcaagaaaggcaagagctcaaggtcaatgacacccctggcctgactcccatgcaagtagctggctgtactgccaaggtacctaggttggagtccagcctaatcaagtcaaatggagaaacaggcccagagaggaaggtggcttaccaagatcacataccagagtctggagctgagctacctggggtgggggccaagtcacaggttggccagaaaaccctggtaagtaatgagggctgagtttgcacagtggtctggaatggactgggtgccacggtggacttagctctgaggagtacccccagcccaagagatgaacatctggggactaatatcatagacccatctggaggctcccatgggctaggagccagtgtgaggctgtaacttatactaaaggttgtgttgcctgctgaaaaaaa

SEQ ID NO: 432 - DNA, 1082 bp, Homo sapiens
ctgtgcatggcatcatcctggccccctctagagctccaatcctccaaccagagccagctcttccctcaaaatgctacggcctgtgacaatgctccagaagcctgggacctgctgcacagagtgctgccgacatttatcatctccatctgtttcttcggcctcctagggaacctttttgtcctgttggtcttcctcctgccccggcggcaactgaacgtggcagaaatctacctggccaacctggcagcctctgatctggtgtttgtcttgggcttgcccttctgggcagagaatatctggaaccagtttaactggcctttcggagccctcctctgccgtgtcatcaacggggtcatcaaggccaatttgttcatcagcatcttcctggtggtggccatcagccaggaccgctaccgcgtgctggtgcaccctatggccagcggaaggcagcagcggcggaggcaggcccgggtcacctgcgtgctcatctgggttgtggggggcctcttgagcatccccacattcctgctgcgatccatccaagccgtcccagatctgaacatcaccgcctgcatcctgctcctcccccatgaggcctggcactttgcaaggattgtggagttaaatattctgggtttcctcctaccactggctgcgatcgtcttcttcaactaccacatcctggcctccctgcgaacgcgggaggaggtcagcaggacaagagtgcgggggccgaaggatagcaagaccacagcgctgatcctcacgctcgtggttgccttcctggtctgctgggccccttaccacttctttgccttcctggaattcttattccaggtgcaagcagtccgaggctgcttttgggaggacttcattgacctgggcctgcaattggccaacttctttgccttcactaacagctccctgaatccagtaatttatgtctttgtgggccggctcttcaggaccaaggtctgggaactttataaacaatgcacccctaaaagtcttgctccaatatcttcatcccataggaaagaaatcttccaacttttctggcggaattaaaacagcattgaacc

SEQ ID NO: 433 - DNA, 1507 bp, Homo sapiens
atggggcgcccactgcacctcgtcctgctcagtgcctccctggctggcctcctgctgctcggggaaagtctgttcatccgcagggagcaggccaacaacatcctggcgagggtcacgagggccaattcctttcttgaagagatgaagaaaggacacctcgaaagagagtgcatggaagagacctgctcatacgaagaggcccgcgaggtctttgaggacagcgacaagacgaatgaattctggaataaatacaaagatggcgaccagtgtgagaccagtccttgccagaaccagggcaaatgtaaagacggcctcggggaatacacctgcacctgtttagaaggattcgaaggcaaaaactgtgaattattcacacggaagctctgcagcctggacaacggggactgtgaccagttctgccacgaggaacagaactctgtggtgtgctcctgcgcccgcgggtacaccctggctgacaacggcaaggcctgcattcccacagggccctacccctgtgggaaacagaccctggaacgcaggaagaggtcagtggcccaggccaccagcagcagcggggaggcccctgacagcatcacatggaagccatatgatgcagccgacctggaccccaccgagaaccccttcgacctgcttgacttcaaccagacgcagcctgagaggggcgacaacaacctcaccaggatcgtgggaggccaggaatgcaaggacggggagtgtccctggcaggccctgctcatcaatgaggaaaacgagggtttctgtggtggaactattctgagcgagttctacatcctaacggcagcccactgtctctaccaagccaagagattcaaggtgagggtaggggaccggaacacggagcaggaggagggcggtgaggcggtgcacgaggtggaggtggtcatcaagcacaaccggttcacaaaggagacctatgacttcgacatcgccgtgctccggctcaagacccccatcaccttccgcatgaacgtggcgcctgcctgcctccccgagcgtgactgggccgagtccacgctgatgacgcagaagacggggattgtgagcggcttcgggcgcacccacgagaagggccggcagtccaccaggctcaagatgctggaggtgccctacgtggaccgcaacagctgcaagctgtccagcagcttcatcatcacccagaacatgttctgtgccggctacgacaccaagcaggaggatgcctgccagggggacagcgggggcccgcacgtcacccgcttcaaggacacctacttcgtgacaggcatcgtcagctggggagagggctgtgcccgtaaggggaagtacgggatctacaccaaggtcaccgccttcctcaagtggatcgacaggtccatgaaaaccaggggcttgcccaaggccaagagccatgccccggaggtcataacgtcctctccattaaagtgagatcccactcaaaaaaaaaaaaaaaaaaaaaaaaaaaaaa

SEQ ID NO: 434 - DNA, 2371 bp, Homo sapiens
  modified_base (1371)..(1688): a, t, c, g, other or unknown
cctttcctctgcggcgggccgagagataaccctgcccgaggggtcccggcgcccgccccccacgcggtcgcactggaattcgcagcccctctcgggtccccggggcgcattttgcagtctgagtggcaatgcacttgctccaggacaggcggctaccccgccgcagcgaggcgcggacttttcttttggggggttcgccggctcgccgcgctccccaccttgcctgcgcccgcccggagccagcggttctccaagcacccagcatcctgctagacgcgccgcgcaccgacggaggggacatgggcagagcaatggtggccaggctcgggctggggctggctgctgctggcactgctcctacccacgcagatttattccagtgaaacaacaactggaacttcaagtaactcctcccagagtacttccaactctgggttggccccaaatccaactaatgccaccaccaaggcggctggtggtgccctgcagtcaacagccagtctcttcgtggtctcactctctcttctgcatctctactcttaagagactcaggccaagaaacgtcttctaaatttccccatcttctaaacccaatccaaatggcgtctggaagtccaatgtggcaaggaaaaacaggtcttcatcgaatctactaattccacaccttttattgacacagaaaatgttgagaatcccaaatttgattgatttgaagaacatgtgagaggtttgactagatgatggatgccaatattaaatctgctggagtttcatgtacaagatgaaggagaggcaacatccaaaatagttaagacatgatttccttgaatgtggcttgagaaatatggacacttaatactaccttgaaaataagaatagaaataaaggatgggattgtggaatggagattcagttttcatttggttcattaattctataaggccataaaacaggtaatataaaaagcttccatgattctatttatatgtacatgagaaggaacttccaggtgttactgtaattcctcaacgtattgtttcgacagcactaatttaatgccgatatactctagatgaagttttacattgttgagctattgctgttctcttgggaactgaactcactttcctcctgaggctttggatttgacattgcatttgaccttttatgtagtaattgacatgtgccagggcaatgatgaatgagaatctacccccagatccaagcatcctgagcaactcttgattatccatattgagtcaaatggtaggcatttcctatcacctgtttccattcaacaagagcactacattcatttagctaaacggattccaaagagtagaattgcattgaccacgactaatttcaaannnnnnnnnnnnnnnnnnnnnnnnnnnnnnnnnnnnnnnnnnnnnnnnnnnnnnnnnnnnnnnnnnnnnnnnnnnnnnnnnnnnnnnnnnnnnnnnnnnnnnnnnnnnnnnnnnnnnnnnnnnnnnnnnnnnnnnnnnnnnnnnnnnnnnnnnnnnnnnnnnnnnnnnnnnnnnnnnnnnnnnnnnnnnnnnnnnnnnnnnnnnnnnnnnnnnnnnnnnnnnnnnnnnnnnnnnnnnnnnnnnnnnnnnnnnnnnnnnnnnnnnnnnnnnnnnnnnnnnnnnnnnnnnnnnnnnnnnnnnnnnnnnnnnnnnnnnnnntatttctgcatatgtttgaatactttttacaatttaaaaaaatgatctgttttgaaggcaaaattgcaaatcttgaaattaagaaggcaaaatgtaaaggagtcaaactataaatcaagtatttgggaagtgaagactggaagctaatttgcataaattcacaaacttttatactctttctgtatatacattttttttctttaaaaaacaactatggatcagaatagcaacatttagaacactttttgttatcagtcaatatttttagatagttagaacctggtcctaagcctaaaagtgggcttgattctgcagtaaatcttttacaactgcctcgacacacataaacctttttaaaaatagacactccccgaagtcttttgttcgcatggtcacacactgatgcttagatgttccagtaatctaatatggccacagtagtcttgattaccaaagtcctttttttccatctttagaaaactacatgggaacaaacagatcgaacagttttgaagctactgtgtgtgtgaatgaacactcttgctttattccagaatgctgtacatctattttggattgtatattgtgtttgtgtatttacgctttgattcatagtaacttcttatggaattgatttgcattgaacacaaactgtaaataaaaagaaatggctgaaagagcaa

SEQ ID NO: 435 - DNA, 1613 bp, Homo sapiens
gtcactctccccaggagacccagacctagaactacccagagcaagaccacagctggtgaacagtccaggagcagacaagatggagacaaattcctctctccccacgaacacctctggagggacacctgctgtatctgctggctatctcttcctggatatcatcacttatctggtatttgcagtcacctttgtcctcggggtcctgggcaacgggcttgtgatctgggtggctggattccggatgacacacacagtcaccaccatcagttacctgaacctggccgtggctgacttctgtttcacctccactttgccattcttcatggtcaggaaggccatgggaggacattggcctttcggctggttcctgtgcaaattcctctttaccatagtggacatcaacttgttcgggaagtgtcttcctgatcgccctcattgctctggaccgctgtgtttgcgtcctgcatccagtctggacccagaaccaccgcaccgtgagcctggccaagaaggtgatcattgggccctgggtgatggctctgctcctcacattgccagttatcattcgtgtgactacagtacctggtaaaacggggacagtagcctgcacttttaacttttcgccctggaccaacgaccctaaagagaggataaacgtggccgttgccatgttgacggtgagaggcatcatccggttcatcattggcttcagcgcacccatgtccatcgttgctgtcagttatgggcttattgccaccaagatccacaagcaaggcttgattaagtccagtcgtcccttacgggtcctctcctttgtcgcagcagccttttttctctgctggtccccatatcaggtggtggcccttatagccacagtcagaatccgtgagttattgcaaggcatgtacaaagaaattggtattgcagtggatgtgacaagtgccctggccttcttcaacagctgcctcaaccccatgctctatgtcttcatgggccaggacttccgggagaggctgatccacgcccttcccgccagtctggagagggccctgaccgaggactcaacccaaaccagtgacacagctaccaattctactttaccttctgcagaggtggcgttacaggcaaagtgaggagggagctgggggacactttcgagctcccagctccagcttcgtctcaccttgagttaggctgagccacaggcatttcctgcttattttaggattacccactcatcagaaaaaaaaaaaaagcctttgtgtcccctgatttggggagaataaacagatatgagtttattattgacttcttttttgattttggacctcagcctcgggtggtcagggtgggaaatgataggaagaagctgtcatctgcatcctagtttgcctgaaatgaacccaaataatacccattattattagtcctgaattatgagtagtgaatgatacccatcattctggcatcatgatgagtagtgtccacttccattctgaaaagtgccctgctgtgaaaaataaattatatagtcatcctaggtaaatgaaggaggagggagaagtgtgaaagagtatggcttaaatcagacaagatatacaagaagatacttt

SEQ ID NO: 436 - DNA, 1992 bp, Homo sapiens
cttcgctcgctccctccctccgtcttaggtcactgttttcaacctcgaataaaaactgcagccaacttccgaggcagcctcattgcccagcggaccccagcctctgccaggttcggtccgccatcctcgtcccgtcctccgccggcccctgccccgcgcccagggatcctccagctcctttcgcccgcgccctccgttcgctccggacaccatggacaagttttggtggcacgcagcctggggactctgcctcgtgccgctgagcctggcgcagatcgatttgaatataacctgccgctttgcaggtgtattccacgtggagaaaaatggtcgctacagcatctctcggacggaggccgctgacctctgcaaggctttcaatagcaccttgcccacaatggcccagatggagaaagctctgagcatcggatttgagacctgcaggtatgggttcatagaagggcacgtggtgattccccggatccaccccaactccatctgtgcagcaaacaacacaggggtgtacatcctcacatccaacacctcccagtatgacacatattgcttcaatgcttcagctccacctgaagaagattgtacatcagtcacagacctgcccaatgcctttgatggaccaattaccataactattgttaaccgtgatggcacccgctatgtccagaaaggagaatacagaacgaatcctgaagacatctaccccagcaaccctactgatgatgacgtgagcagcggctcctccagtgaaaggagcagcacttcaggaggttacatcttttacaccttttctactgtacaccccatcccagacgaagacagtccctggatcaccgacagcacagacagaatccctgctaccagagaccaagacacattccaccccagtggggggtcccataccactcatggatctgaatcagatggacactcacatgggagtcaagaaggtggagcaaacacaacctctggtcctataaggacaccccaaattccagaatggctgatcatcttgggcatccctcttggccttggctttgattcttgcagtttgcattgcagtcaacagtcgaagaaggtgtgggcagaagaaaaagctagtgatcaacagtggcaatggagctgtggaggacagaaagccaagtggactcaacggagaggccagcaagtctcaggaaatggtgcatttggtgaacaaggagtcgtcagaaactccagaccagtttatgacagctgatgagacaaggaacctgcagaatgtggacatgaagattggggtgtaacacctacaccattatcttggaaagaaacaaccgttggaaacataaccattacagggagctgggacacttaacagatgcaatgtgctactgattgtttcattgcgaatcttttttagcataaaattttctactctttttgttttttgtgttttgttctttaaagtcaggtccaatttgtaaaaacagcattgctttctgaaattagggcccaattaataatcagcaagaatttgatcgttccagttcccacttggaggcctttcatccctcgggtgtgctatggatggcttctaacaaaaactacacatatgtattcctgatcgccaacctttcccccaccagctaaggacatttcccagggttaatagggcctggtccctgggaggaaatttgaatgggtccattttggccttccatagcctaatccctgggcattgctttccactgaggttgggggttggggtgtactagttacacatcttcaacagaccccctctagaaatttttcagatgcttctgggagacacccaaagggtgaagctatttatctgtagtaaactatttatctgtgtttttgaaatattaaaccctggatcagtcctttgatcagtataattttttaaagttactttgtcagaggcacaaaagggtttaaactgattcataataaatatctgtacttcttcgatcttca

SEQ ID NO: 437 - DNA, 2526 bp, Sus scrofa
cgggctccgataaccgaagcagcgatcggagatggatgtctctctttgcccagccaagtgtagtttctggcggattttcttgctgggaagcgtctggctggactatgtgggctccgtgctggcttgccctgcaaattgtgtctgcagcaagactgagatcaattgccggcggccggacgatgggaacctcttccccctcctggaagggcaggattcagggaacagcaatgggaatgccagcatcaacatcacggacatctcaaggaatatcacttccatacacatagagaactggcgcggtctgcacacgctcaacgctgtggacatggagctctacaccggcctccagaagctgaccatcaagaactcaggacttcggagcatccagcccagagcctttgccaagaacccccacctgcgctacataaacctgtcgagtaaccggctcaccacactctcatggcagctcttccagacgctgagtcttcgggaattgagattggagcagaacttcttcaactgcagctgtgacatccgctggatgcagctgtggcaggagcagggggaggccaagctgaacagccagagcctctattgcatcagtgccgatggctcccagctccccctcttccgcatgaacattagccagtgtgaccttcctgagatcagtgtgagccacgtcaatctgaccgttcgggagggtgacaatgctgttgtcacctgcaatggctctggatcacccctgcccgacgtggactggatcgtcactggactgcagtccatcaacacccaccagacaaatctgaattggaccaacgtacacgccatcaacctgacactggtcaatgtgacgagtgaggacaacggcttcaccctgacgtgcattgcagagaacgtggtgggcatgagcaatgccagcgtcgccctcactgttcactaccccccacgagtggtgagcctggaggagccagagctgcgcctggaacactgcatcgagtttgtggtgcgtggcaacccgccgcccacgctgcactggctgcacaacgggcagccgctgcgtgagtccaagatcacccacgtggagtactaccaggagggcgaggtctccgagggctgcctgctcttcaacaagcccacccactacaacaatggcaactacacactcaatcgccaagaaccccttggcacagccaaccagaccatcaatggccacttcctcaaggagccttttccagagagcacggataactttgtctctttctatgaagtgagccccacccctcccatcactgtgacgcacaagccagaggaagatacatttggggtatccatagctgttggacttgccgcttttgcctgtgtccttctggtggttctctttatcatgatcaacaagtatggtcgacggtctaaatttggaatgaagggtcctgtggctgtcatcagtggtgaagaggactcagccagcccactgcatcacgatcaaccatggcatcaccacaccctcatcactggacgccgggccggacacagtgtcattggcatgacccgcatcccagtcattgagaacccccagtacttccgccagggacacaactgccacaagccagacacgtatgtgcagcacattaaaaggagggacatcgtgctgaagcgagaactgggtgagggagcctttgggaaggtcttcctggccgagtgctacaacctcagccccaccaaggtcaagatgctcgtggctgtgaaggccctgaaggatcccaccctggccgcccggaaggatttccagagggaggctgagctgctcaccaacctgcagcatgagcacattgtcaagttctatggggtgtgcggcgacggggacccactcatcatggtttttgagtacatgaaacacggggatctgaacaagttcctcagggcccatgggccagatgccatgatcctcgtggacggccagccacgccaggcaaaaggcgagctggggctctcccagatgctgcacattgccagtcagatctgctctggcatggtgtacctggcctcccagcattttgtgcaccgggacctggccaccaggaactgcctggttggagccaacctgctggtgaagattggcgatttcggcatgtccagagatgtctacagcacggattactacagggtaggaggacacaccatgctcccaattcgctggatgcctcctgaaagcatcatgtaccggaagttcactactgagagtgacgtgtggagcttcggggtgatcctctgggagatcttcacctacggaaagcagccatggttccaactctcaaacacagaggtcattgagtgcatcacccaaggtcgcgttttggaacggccccgggtctgccccaaagaggtgtatgatgtcatgctggggtgctggcagagggaaccgcagcagcggctgaacatcaaggaaatctacaaaatcctccatgctttggggaaagccacccccatctacctggacatccttggctagcggtggccggtggtcac

SEQ ID NO: 438 - DNA, 3206 bp, Homo sapiens
  modified_base (2351): a, t, c, g, other or unknown
  modified_base (2362): a, t, c, g, other or unknown
  modified_base (2368): a, t, c, g, other or unknown
gttggcgaggagtttcctgtttcccccgcagcgctgagttgaagttgagtgagtcactcgcgcgcacggagcgacgacacccccgcgcgtgcacccgctcgggacaggagccggactcctgtgcagcttccctcggccgccgggggcctccccgcgcctcgccggcctccaggccccctcctggctggcgagcgggcgccacatctggcccgcacatctgcgctgccggcccggcgcggggtccggagagggcgcggcgcggaggcgcagccaggggtccgggaaggcgccgtccgctgcgctgggggctcggtctatgacgagcagcggggtctgccatgggtcgggggctgctcaggggcctgtggccgctgcacatcgtcctgtggacgcgtatcgccagcacgatcccaccgcacgttcagaagtcggttaataacgacatgatagtcactgacaacaacggtgcagtcaagtttccacaactgtgtaaattttgtgatgtgagattttccacctgtgacaaccagaaatcctgcatgagcaactgcagcatcacctccatctgtgagaagccacaggaagtctgtgtggctgtatggagaaagaatgacgagaacataacactagagacagtttgccatgaccccaagctcccctaccatgactttattctggaagatgctgcttctccaaagtgcattatgaaggaaaaaaaaaagcctggtgagactttcttcatgtgttcctgtagctctgatgagtgcaatgacaacatcatcttctcagaagaatataacaccagcaatcctgacttgttgctagtcatatttcaagtgacaggcatcagcctcctgccaccactgggagttgccatatctgtcatcatcatcttctactgctaccgcgttaaccggcagcagaagctgagttcaacctgggaaaccggcaagacgcggaagctcatggagttcagcgagcactgtgccatcatcctggaagatgaccgctctgacatcagctccacgtgtgccaacaacatcaaccacaacacagagctgctgcccattgagctggacaccctggtggggaaaggtcgctttgctgaggtctataaggccaagctgaagcagaacacttcagagcagtttgagacagtggcagtcaagatctttccctatgaggagtatgcctcttggaagacagagaaggacatcttctcagacatcaatctgaagcatgagaacatactccagttcctgacggctgaggagcggaagacggagttggggaaacaatactggctgatcaccgccttccacgccaagggcaacctacaggagtacctgacgcggcatgtcatcagctgggaggacctgcgcaagctgggcagctccctcgcccgggggattgctcacctccacagtgatcacactccatgtgggaggcccaagatgcccatcgtgcacagggacctcaagagctccaatatcctcgtgaagaacgacctaacctgctgcctgtgtgactttgggctttccctgcgtctggaccctactctgtctgtggatgacctggctaacagtgggcaggtgggaactgcaagatacatggctccagaagtcctagaatccaggatgaatttggagaatgttgagtccttcaagcagaccgatgtctactccatggctctggtgctctgggaaatgacatctcgctgtaatgcagtgggagaagtaaaagattatgagcctccatttggttccaaggtgcgggagcacccctgtgtcgaaagcatgaaggacaacgtgttgagagatcgagggcgaccagaaattcccagcttctggctcaaccaccagggcatccagatggtgtgtgagacgttgactgagtgctgggaccacgacccagaggcccgtctcacagcccagtgtgtggcagaacgcttcagtgagctggagcatctggacaggctctcggggaggagctgctcggaggagaagattcctgaagacggctccctaaacactaccaaatagctcttctggggcaggctgggccatgtccaaagaggctgcccctctcaccaaagaacagaggcagcaggaagctgcccctgaactgatgcttcctggaaaaccaagggggtcactcccctccctgtaagctgtggggataagcagaaacaacagcagcagggagtgggtgacatagagcattctatgcctttgacattgtcataggataagctgtgttagcacttcctcaggaaatgagattgatttttacaatagccaataacatttgcactttattaatgcctgtatataaatatgaatagctatgtnttatatatatntatatntctatatatgtctatagctctatatatatagccataccttgaaaagagacaaggaaaaacatcaaatattcccaggaaattggttttattggagaactccagaaccaagcagagaaggaagggacccatgacagcattagcatttgacaatcacacatgcagtggttctctgactgtaaaacagtgaactttgcatgaggaaagaggctccatgtctcacagccagctatgaccacattgcacttgcttttgcaaaataatcattccctgcctagcacttctcttctggccatggaactaagtacagtggcactgtttgaggaccagtgttcccggggttcctgtgtgcccttatttctcctggacttttcatttaagctccaagccccaaatctggggggctagtttagaaactctccctcaacctagtttagaaactctaccccatctttaataccttgaatgttttgaaccccactttttaccttcatgggttgcagaaaaatcagaacagatgtccccatccatgcgattgccccaccatctactaatgaaaaattgttctttttttcatctttcccctgcacttatgttactattctctgctcccagccttcatccttttctaaaaaggagcaaattctcactctaggctttatcgtgtttactttttcattacacttgacttgattttctagttttctatacaaacaccaatgggttccatctttctgggctcctgattgctcaagcacagtttggcctgatgaagaggatttcaactacacaatactatcattgtcaggactatgcacctcaggcactctaaaacacatgt

SEQ ID NO: 439 - DNA, 5027 bp, Homo sapiens
cacactcgcacccgcgcacgcaccgccagcaggcagcggccaccgccgcgatgctcgcccgcgggttggggaagtttcccgccggcctcggccgcgggcacccgtgctcccaggtgtagcgcccccgcgcggcgcgggcggccggcgcctccagcatgaccggccagagcctgtgggacgtgtcggaggctaacgtcgaggacggggagatccgcatcaatgtgggcggcttcaagaggaggctgcgctcgcacacgctgctgcgcttccccgagacgcgcctgggccgcttgctgctctgccactcgcgcgaggccattctggagctctgcgatgactacgacgacgtccagcgggagttctacttcgaccgcaaccctgagctcttcccctacgtgctgcatttctatcacaccggcaagcttcacgtcatggctgagctatgtgtcttctccttcagccaggagatcgagtactggggcatcaacgagttcttcattgactcctgctgcagctacagctaccatggccgcaaagtagagcccgagcaggagaagtgggacgagcagagtgaccaggagagcaccacgtcttccttcgatgagatccttgccttctacaacgacgcctccaagttcgatgggcagcccctcggcaacttccgcaggcagctgtggctggcgctggacaaccccggctactcagtgctgagcagggtcttcagcatcctgtccatcctggtggtgatggggtccatcatcaccatgtgcctcaatagcctgcccgatttccaaatccctgacagccagggcaaccctggcgaggaccctaggttcgaaatcgtggagcactttggcattgcctggttcacatttgagctggtggccaggtttgctgtggcccctgacttcctcaagttcttcaagaatgccctaaaccttattgacctcatgtccatcgtccccttttacatcactctggtggtgaacctggtggtggagagcacacctactttagccaacttgggcagggtggcccaggtcctgaggctgatgcggatcttccgcatcttaaagctggccaggcactccactggcctccgctccctgggggccactttgaaatacagctacaaagaagtagggctgctcttgctctacctctccgtggggatttccatcttctccgtggtggcctacaccattgaaaaggaggagaacgagggcctggccaccatccctgcctgctggtggtgggctaccgtcagtatgaccacagtggggtacggggatgtggtcccagggaccacggcaggaaagctgactgcctctgcctgcatcttggcaggcatcctcgtggtggtcctgcccatcaccttgatcttcaataagttctcccacttttaccggcgccaaaagcaacttgagagtgccatgcgcagctgtgactttggagatggaatgaaggaggtcccttcggtcaatttaagggactattatgcccataaagttaaatcccttatggcaagcctgacgaacatgagcaggagctcaccaagtgaactcagtttaaatgattccctacgttagccgggaggacttgtcaccctccaccccacattgctgagctgcctcttgtgcctctggcacagcccaggcaccttatggttatggtgtaaggagtatgcccagcccctgaggggagagatgcatgggatatgcacccaggtttcttttacagtttttagaatcgtttttagagggtggtgtgtctgacaccatgcctttgcacctttccatgaaatgacactcactggtctttgcatcgtgggcataaaatgttcacctttttgccagatgagtacacccagaatgctaatttttctgtccatcgtgtacgctattctagtgcttgtggcccagtactgtctatgagttgtcgtgctcctgtttctgaggttgtcgtgtgagttctgtacaaaaagcccccacaagtcgtccagtagaaatgcatctatgaggtcagcaaggatatgatgagattttgctcacagtcatgtgaaaacaaaatctcagctctttatccattgctttcacttagttttagtaccaaaacaaagagaatgcaaagttaagcagacttgaccaatgcaagtctctaagttgtttttataaatgatctgtagttccgtggcttgcatgggtgcaccaatcatctttagaacgatgtacactgatgttcatctcataaatgtcactctttagagaatgttacttagttaaacatgcagtgaagatcgaatttttttcccaagaacagatgtgttagggagaggggcttcagctaaatagtccaaaccctagggtgcttaaagccaagttagtgcaggctgagccccttggttcacagtcaagcctccttgtttcctagggtgactgtagagaaatgtatttccggatgaggtttctgatctaggccatttgaccaaactttgctgtgtctaagatattagcatgtttttgaaatatttattttttaagatgtttaggagtaaggtcgtgttgtcttcctcaactaaaaagaagtttactgttgtatcgtctccctgaggtgaacgttgttgggttgctagcaagggcagtagcttaaatacttttgttgcctactctgaaagctcatcaaatgagagcccttttatttccaagcagaatttagtcagataattttgcttctaggatatagtatgttgtatatgatgctgtgattgccctggagttcctgccatgacatggaaacctggtggtatggaagcatgtactcaaaatatagacgtgcacgatggtggtgtggcttacccaggatggaaacactgcagttcttacttgcattcccactgcctttcatggggggtgactgggtagaggccaggagaaaggaaagagttgtaaaataaaaaactgctagttcataaaatgtcataaaaaattgtaaacttgaaaagcttaatgctattcaaaagaccttcaagcttccaaacttgtattgaagggagacgactgtttcctcctccaaaatgctcctgctcctcttgttcggttaaccagcacataacattgtgatggggaacctgggttcctctataagataattcttctccatcatctttaaggtaatctgatggttttccaggtggctttcattattgttccatctttgaaaaggcaatagaacccaggggtctgagcatggagctatccagggttttcatccaaaggttgggcctcttcttaagaggtccttttgtgtttcagttgattgaagatgatacttacctcattggaggtgtggcaaggatcttatcagaaggctttgtgttcttgtagttgtcatggctactacagtgtgggtgatttattgaatgaattcactagccacttgtgtcctggagcccccagttcaaatctttccattggactggaggcttgtgggaggctgggaggtggctgtctcctagtgtctacatccgtgtctctgaagcatcaggaaaagtgagatgacttagaggcaactgggcactgaatcagaggagcagagttatttttcagaatttgcacatggaacacttagatttggctggtgcttccagccctggaaggcataacatttacggactcatccccagctgcactgaaggcaggtggtggtacagacttatgaggacggatcagtttgccaaggctgatggtattgggtcactgagcctggtatccatggccgctgaccaggaagcttatgcaaagtggaagcaaggaacaaggcagaataactcagtcactttcatgaagatttttctaaacaagaaggcttaccaccaaaaaagaggtaccctagtggttaccctttgcagatgtgaaagctggaaaacttgacttttctttttggtaatgacttgcatttatctggtgcctttcgttggaggaatcccaacgtgctttagagactatctttttaacatctcttgtacatacatatatacttatataaaatattatcttgcccaactggacctttactcacttctgagcatgagaatgtcccaatagcattgagtttttcaagtggtggtttcagataagtgggagaaagaacaacccggctggcttaaaccctggagctaattcccacaaggaatgtagactgaatggtgacccagggagaaataatcttcctctcccctaaagtctcactaaggtttgaagtttacaggtgctctccactgggtctttgatcgaccttgctagataacatctaactaaaagcagtttcttttagtccctgaagctaaccagggagagtcaggttaattttctgtaaaaatatgaggtgacatctttggcaaccaggctgtcagactgacctgtaaacctcctttagggggacagagtagaaactggagatgacttgtttccagctgtgagcttgagagaagtgtcactcccagcatttgaaggttattgttttcaatgccagtgggccaaatatatgggccaggctttgatatctgtgatgtgcattttggaagtgctgggttgggaagtgacacgtctgttgcacaaatgcatattggttataggtttgtgttttctgccaaacccccacatttctcgggtttgtgagtgaggaagggcatgttgtaatgccaagctgatttgtagctcgtaaggtagtaattggtatttaacatttgcatttgttatttctacttatcttagcactcaaataattgaactacctgctaattcttgccgcatttcaaagaaaataagttgttatgcactttgggatagtggtgatctgtacaggctgtgtgttagctacttgaaggcgtaactggtatttcttgtgtgttttaacagcatgacttcttacagagctgtaatttttaaaattgaggatgccatatttgagatgtcagttttaacactcattaacacactactgtgcaagcattgacacaggctgcactg

SEQ ID NO: 440 - DNA, 2595 bp, Homo sapiens
  modified_base (180): a, t, c, g, other or unknown
  modified_base (370): a, t, c, g, other or unknown
tctagaccaccagcctggacaacataccaagaccctgtctctacaaataaatagataaataaatagacactttttttaagtgtcaaaagtgcttggcacttagtagaccatcagtgttaggtgctcatacataccccgattattgccttgtcccagtgtcttgtacaggggttggagagnaggtgttaagaaatgaccgaatgggtaaatggatgaacagaacacctccctccagagcccacatgctcgtgggcctctgggaccactctcctcctcctcttgcttccctgagctcccccagcatggcctctgtccaggccttgcgctgcctccaggcctttgctgtggctactgcccctggagcgccatntccacagctcctcctgtggctggctcctcatcacccagatgacctggtgggtgaggccacctagcaaggagtcatgcctgtcctgccttctgactcactctctcatcaccctgccttttttttcttttgtggctcacgtgtttgcatgtctccccccatgaggcagggggccatgtgtgtcttattcacttctgtagccacagcaccctgagcaatgcttgccacatagtaggtgctcaattaatgttgaatgaatgggcaaaatgcgggatggcgggacagagttctctcaaggcattctgccagagaatgtccctctgtcaccttgaatccagtgtacctccagatgactcccccattccctcctgtagttcatgcttttctctccccttcctccccagacacggcctacccacccctggcaaccaacatggccaacttcacacctgtcaatggcagctcgggcaatcagtccgtgcgcctggtcacgtcatcatcccacaatcgctatgagacggtggaaatggtcttcattgccacagtgacaggctccctgagcctggtgactgtcgtgggcaacatcctggtgatgctgtccatcaaggtcaacaggcagctgcagacagtcaacaactacttcctcttcagcctggcgtgtgctgatctcatcataggcgccttctccatgaacctctacaccgtgtacatcatcaagggctactggcccctgggcgccgtggtctgcgacctgtggctggccctggactacgtggtgagcaacgcctccgtcatgaaccttctcatcatcagctttgaccgctacttctgcgtcaccaagcctctcacctaccctgcccggcgcaccaccaagatggcaggcctcatgattgctgctgcctgggtactgtccttcgtgctctgggcgcctgccatcttgttctggcagtttgtggtgggtaagcggacggtgcccgacaaccactgcttcatccagttcctgtccaacccagcagtgacctttggcacagccattgctgccttctacctgcctgtggtcatcatgacggtgctgtacatccacatctccctggccagtcgcagccgagtccacaagcaccggcccgagggcccgaaggagaagaaagccaagacgctggccttcctcaagagcccactaatgaagcagagcgtcaagaagccccgcccgggaggccgcccgggaggactgcgcaatggcaagctggaggaggcccccccgccagcgctgccaccgccaccgcgccccgtggctgataaggacacttccaatgagtccagctcaggcagtgccacccagaacaccaaggaacgcccagccacagagctgtccaccacagaggccaccactcccgccatgcccgcccctcccctgcagccgcgggccctcaacccagcctccagatggtccaagatccagattgtgacgaagcagacaggcaatgagtgtgtgacagccattgagattgtgcctgccacgccggctggcatgcgccctgcggccaacgtggcccgcaagttcgccagcatcgctcgcaaccaggtgcgcaagaagcggcagatggcggcccgggagcgcaaagtgacacgaacgatctttgccattctgctagccttcatcctcacctggacgccctacaacgtcatggtcctggtgaacaccttctgccagagctgcatccctgacacggtgtggtccattggctactggctctgctacgtcaacagcaccatcaaccctgcctgctatgctctgtgcaacgccacctttaaaaagaccttccggcacctgctgctgtgccagtatcggaacatcggcactgccaggtaggcaggcaggagtgccctaggaggtgcggtgtgcgtgcgtgtgctgggggaccacacggctcacttgctgtggggaagagtgcaggcaccattctgcgttcacgtttgctgaggaggaagttcagaagaggctctgtggctgcattcagagaccagatctctgctcacccgtgaggaggctcaccccagggagtgtctgaactggggctgcctggcccacctctgtggccctgcttcagcgagctgcggggcactggcctgggtgggcacctgcccactgtgaccaaccatcagcagtgctggaagaatggagatctggatgggggccgaagcccagggccccctcaggaagaacaaag

SEQ ID NO: 441 - DNA, 935 bp, Homo sapiens
ttagagccccaggttctgtgcccttttcctatcatcgcaaaactcatgatgctccggctgctcagttccctcctccttgtggccgttgcctcaggctatggcccaccttcctctcgcccttccagccgcgttgtcaatggtgaggatgcggtcccctacagctggccctggcaggtttccctgcagtatgagaaaagtggaagcttctaccacacgtgtggcggtagcctcatcgcccccgactgggttgtgactgccggccactgcatctcgagctcctggacctaccaggtggtgttgggcgagtacgaccgtgctgtgaaggagggccccgagcaggtgatccccatcaactctggggacctctttgtgcatccactctggaaccgctcgtgtgtggcctgtggcaatgacatcgccctcatcaagctctcacgcagcgcccagctggggagacgccgtccagctcgcctcactccctcccgctggtgacatccttcccaacgagacaccctgctacatcaccggctggggccgtctctataccaacgggccactcccagacaagctgcaggaggccctgctgcccgtggtggactatgaacactgctccaggtggaactggtggggttcctccgtgaagaagaccatggtgtgtgctggaggggacatccgctccggctgcaacggtgactctggaggacccctcaactgccccacagaggatggtggctggcaggtccatggcgtgaccagctttgtttctgcctttggctgcaacacccgcaggaagcccacggtgttcactcgagtctccgccttcatcgactggattgaggagaccatagcaagccactagaaccaaggcccagctggcagtgctgatcgatcccacatcctgaataaagaataaagatctctcagaaaattcaaaa

SEQ ID NO: 442 - DNA, 2550 bp, Homo sapiens
  modified_base (2539): a, t, c, g, other or unknown
  modified_base (2541): a, t, c, g, other or unknown
  modified_base (2546): a, t, c, g, other or unknown
ccaagacagcacagacagattgacctattggggtgtttcgcgagtgtgagagggaagcgccgcggcctgtatttctagacctgcccttcgcctggttcgtggcgccttgtgaccccgggcccctgccgcctgcaagtcggaaattgcgctgtgctcctgtgctacggcctgtggctggactgcctgctgctgcccaactggctggcaagatgaagctctccctggtggccgcgatgctgctgctgctcagcgcggcgcgggccgaggaggaggacaagaaggaggacgtgggcacggtggtcggcatcgacctggggaccacctactcctgcgtcggcgtgttcaagaacggccgcgtggagatcatcgccaacgatcagggcaaccgcatcacgccgtcctatgtcgccttcactcctgaaggggaacgtctgattggcgatgccgccaagaaccagctcacctccaaccccgagaacacggtctttgacgccaagcggctcatcggccgcacgtggaatgacccgtctgtgcagcaggacatcaagttcttgccgttcaaggtggttgaaaagaaaactaaaccatacattcaagttgatattggaggtgggcaaacaaagacatttgctcctgaagaaattctgccatggttctcactaaaatgaaagaaaccgctgaggcttatttgggaaagaaggttacccatgcagttgttactgtaccagcctattttaatgatgcccaacgccaagcaaccaaagacgctggaactattgctggcctaaatgttatgaggatcatcaacgagcctacggcagctgctattgcttatggcctggataagagggagggggagaagaacatcctggtgtttgacctgggtggcggaaccttcgatgtgtctcttctcaccattgacaatggtgtcttcgaagttgtggccactaatggagatactcatctgggtggagaagactttgaccagcgtgtcatggaacacttcatcaaactgtacaaaaagaagacgggcaaagatgtcaggaaagacaatagagctgtgcagaaactccggcgcgaggtagaaaaggccaaacgggccctgtcttctcagcatcaagcaagaattgaaattgagtccttctatgaaggagaagacttttctgagaccctgactcgggccaaatttgaagagctcaacatggatctgttccggtctactatgaagcccgtccagaaagtgttggaagattctgatttgaagaagtctgatattgatgaaattgttcttgttggtggctcgactcgaattccaaagattcagcaactggttaaagagttcttcaatggcaaggaaccatcccgtggcataaacccagatgaagctgtagcgtatggtgctgctgtccaggctggtgtgctctctggtgatcaagatacaggtgacctggtactgcttgatgtatgtccccttacacttggtattgaaactgtgggaggtgtcatgaccaaactgattccaaggaacacagtggtgcctaccaagaagtctcagatcttttctacagcttctgataatcaaccaactgttacaatcaaggtctatgaaggtgaaagacccctgacaaaagacaatcatcttctgggtacatttgatctgactggaattcctcctgctcctcgtggggtcccacagattgaagtcacctttgagatagatgtgaatggtattcttcgagtgacagctgaagacaagggtacagggaacaaaaataagatcacaatcaccaatgaccagaatcgcctgacacctgaagaaatcgaaaggatggttaatgatgctgagaagtttgctgaggaagacaaaaagctcaaggagcgcattgatactagaaatgagttggaaagctatgcctattctctaaagaatcagattggagataaagaaaagctgggaggtaaactttcctctgaagataaggagaccatggaaaaagctgtagaagaaaagattgaatggctggaaagccaccaagatgctgacattgaagacttcaaagctaagaagaaggaactggaagaaattgttcaaccaattatcagcaaactctatggaagtgcaggccctcccccaactggtgaagaggatacagcagaaaaagatgagttgtagacactgatctgctagtgctgtaatattgtaaatactggactcaggaacttttgttaggaaaaaattgaaagaacttaagtctcgaatgtaattggaatcttcacctcagagtggagttgaaactgctatagcctaagcggctgtttactgcttttcattagcagttgctcacatgtctttgggtgggggggagaagaagaattggccatcttaaaaagcgggtaaaaaacctgggttagggtgtgtgttcaccttcaaaatgttctatttaacaactgggtcatgtgcatctggtgtaggaagttttttctaccataagtgacaccaataaatgtttgttatttacactggaaaaaaaaaaaaaangnggccnccga

SEQ ID NO: 443 - DNA, 2656 bp, Homo sapiens
gacgtaggatcaagacagcacgtggacctcgcacagcctctcccacaggtaccatgaaggtctccgcggcagccctcgctgtgcatcctcattgctactgccctctgcgctcctgcatctgcctccccatattcctcggacaccacaccctgctgctttgcctacattgcccgcccactgccccgtgcccacatcaaggagtatttctacaccagtggcaagtgctccaacccagcagtcgtctttgtcacccgaaagaaccgccaagtgtgtgccaacccagagaagaaatgggttcgggagtacatcaactctttggagatgagctaggatggagagtccttgaacctgaacttacacaaatttgcctgtttctgcttgctcttgtcctagcttgggaggcttcccctcactatcctaccccacccgctccttgaagggcccagattctaccacacagcagcagttacaaaaaccttccccaggctggacgtggtggctcacgcctgtaatccccagcacttttgggaggctgaggcgggtggaccccggggttaaagagatccgagccattcttggttaccccggtgaaaccccagtctccactaagaatttaaaaaattagccgggcgtggtagcgggcgcctgtagtcccagctactcgggaggctgaggcaggagaatggcgtgaacccgggaggcggagcttgcagtgagccgagatcgcgccactgcactccagcctgggagacagtgtaagactgtctcaaaaaaaataaaataaaataaaaagtcagatcagtaaaactgataaacccctacccaacctgattaggaaagtgagaacagaaattaccagtatcataatgaaaaggaaattatcaacacagctcctaaagacattaaaagggtaagaagggaccattataaataaccttatgtctacaaatttgataacctgggtcaaaaggatagatttcttggatagattcattacctaaatgacaccaagatcaaaccaaaaaatgtgaatagccctatatttattaaatacactatagaaaaccagacaaagaaaatttaaggcccagatggtttcagacattaattctacagccctgacaaggaaaaaggggatagttagaattgggttactaaaaagttagcttttaatatcaacaggaatactggtcaagagtccacattatgcaggttgtaaatggtagacactataaacaaataggaatcagctctgatgatactcattttttcttccctttcaaaggcttggcaaataaagccgggtcaatttgctcctttgccagtcctctgacagagaagagtcttgctgcccgctcctgcagagtgcccccacatttcagtccaagggccatcagttcacatttgagcttctccaaacccagcaactccagttctgcaacagaggtgaacgccaataaatctatagtttccttatcaataactgcgtttcctggctggctttcctgcagtttggcaacggcaacgttttccctttcttcaggtgctacctcagcaactctttccccatcagtcctttcttctgtctctttatccttattcagtccagccccagtgggctcctcttctatgggttctttactctctgccttcttctcctgggtctcttctgtttctgtaaccatcctgctttccatgtgctctttggactcccccagctcagcacatgagtcttctaaaatatgcctcccagagtcagtcaccgggatctgcagttgttctggtgatccatggtctgtattcactactctcgccctctgagaaccactgggaaatttggctgccatctcgacaccattgctaccaatttttggagcatggaaacccattcctgaagtgcttggtgcttcttcactgtcatcatctgaactctcagagttggacccttctgcagtctctagtccctccatgcccaaccagaagcatctcctctttcccgcactggctcctctgtctgtttgagatttagtaggccattgccgtttccgattctcactgatttctgctgaaaccatcttgctggaggcagcctgcatacctttgaggacggaatcctccagacgctcagccatctcatggcactgctgctggtagtcggggctggtgaagcagtgcttgggttctacaagcttccgctgcagtcgctccagccgcttctgctccttttcagcctctcgctcggcttgttgttttacccattcagccattgctttttcatgattgacatcgcgtagtctccttccactgagatcccgacaagcttctcgattggttgtcttctcaatctgagcaccaagtgctcggagcatagatccaaaacctccttttccaccgcaaagtctgggttccaaactataaacagctccatgctgcactgtgtcactggtgttaatgagtgctccattgcatttcacaaagaagttttccactggaacattctgatcttggcagtgccggtggataaaatcccggacggtgcaccgacccgaggcacaccgcaccgccttgcacccgaagccagggccgcgaatccacaccagcgccgcggcctccggccatgtcaccgactacccgaacctcaagcctctctgtagac

SEQ ID NO: 444 - DNA, 2557 bp, Homo sapiens
ccccgggcgcaggaggcgggcggcccggccccaccggccccccatggacgcccccagcacggggcgctgagacccccgcgtcgctgcccagcccggtccggcgcgccacgccgagggatctctggacaggacaagactccgaagctactcccccagcacacagcccgggacccacaaacccagcttgcccccagccctcccacctgccactccctggcccctcccaccgcccgccccccttggggcgcagggcatggtgtgaaaggccaagtgctgaggcgggtatcatgggtgctgtgccctagggcctgggtggcagggggtgggtggcctgtgggtgtgccgggggggccagtgtgcccaccccagtctcttggcgtgctggagggcatcctggatggaattgaagtgaatggaacagaagccaagcaaggtggagtgtgggtcagacccagaggagaacagtgccaggtcaccagatggaaagcgaaaaagaaagaacggccaatgttccctgaaaaccagcatgtcagggtatatccctagttacctggacaaagacgagcagtgtgtcgtgtgtggggacaaggcaactggttatcactaccgctgtatcacttgtgagggctgcaagggcttctttcgccgcacaatccagaagaacctccatcccacctattcctgcaaatatgacagctgctgtgtcattgacaagatcacccgcaatcagtgccagctgtgccgcttcaagaagtgcatcgccgtgggcatggccatggacttggttctagatgactcgaagcgggtggccaagcgtaagctgattgagcagaaccgggagcggcggcggaaggaggagatgatccgatcactgcagcagcgaccagagcccactcctgaagagtgggatctgatccacattgccacagaggcccatcgcagcaccaatgcccagggcagccattggaaacagaggcggaaattcctgcccgatgacattggccagtcacccattgtctccatgccggacggagacaaggtggacctggaagccttcagcgagtttaccaagatcatcaccccggccatcacccgtgtggtggactttgccaaaaaactgcccatgttctccgagctgccttgcgaagaccagatcatcctcctgaaggggtgctgcatggagatcatgtccctgcgggcggctgtccgctacgaccctgagagcgacaccctgacgctgagtggggagatggctgtcaagcgggagcagctcaagaatggcggcctgggcgtagtctccgacgccatctttgaactgggcaagtcactctctgcctttaacctggatgacacggaagtggctctgctgcaggctgtgctgctaatgtcaacagaccgctcgggcctgctgtgtgtggacaagatcgagaagagtcaggaggcgtacctgctggcgttcgagcactacgtcaaccaccgcaaacacaacattccgcacttctggcccaagctgctgatgaaggagagagaagtgcagagttcgattctgtacaagggggcagcggcagaaggccggccgggcgggtcactgggcgtccacccggaaggacagcagcttctcggaatgcatgttgttcagggtccgcaggtccggcagcttgagcagcagcttggtgaagcgggaagtctccaagggccggttcttcagcaccagagcccgaagagcccgcagcagcgtctcctggagctgctccaccgaagcggaattctccatgcccgagcggtctgtggggaagacgacagcagtgaggcggactccccgagctcctctgaggaggaaccggaggtctgcgaggacctggcaggcaatgcagcctctccctgaagccccccagaaggccgatggggaaggagaaggagtgccataccttctcccaggcctctgccccaagagcaggaggtgcctgaaagctgggagcgtgggctcagcagggctggtcacctcccatcccgtaagaccaccttcccttcctcagcaggccaaacatggccagactcccttgctttttgctgtgtagttccctctgcctgggatgcccttccccctttctctgcctggcaacatcttacttgtcctttgaggccccaactcaagtgtcacctccttccccagctcccccaggcagaaatagttgtctgtgcttccttggttcatgcttctactgtgacacttatctcactgttttataattagtcgggcatgagtctgtttcccaagctagactgtgtctgaatcatgtctgtatccccagtgcccggtgcagggcctggcatagagtaggtactccataaaaggtgtgttgaattgaactgcgtctgcctcctcccccgggtcaggcgagagcctgacctacctgcagagacaagcaccaccgcggtgaagaggcccagctcctcctcggtaagcgccagggagttgagcttctcgctgaagtcgaacatggcactgagcaggtctcccatgcccatggcaccaagctcctgcaggctgtaggtg

SEQ ID NO: 445 - DNA, 781 bp, Homo sapiens
cagaaggacacgggcagcagacagtggtcagtcctttcttggctctgctgacactcgagcccacattccgtcacctgctcagaatcatgcaggtctccactgctgcccttgctgtcctcctctgcaccatggctctctgcaaccagttctctgcatcacttgctgctgacacgccgaccgcctgctgcttcagctacacctcccggcagattccacagaatttcatagctgactactttgagacgagcagccagtgctccaagcccggtgtcatcttcctaaccaagcgaagccggcaggtctgtgctgaccccagtgaggagtgggtccagaaatatgtcagcgacctggagctgagtgcctgaggggtccagaagcttcgaggcccagcgacctcggtgggcccagtggggaggagcaggagcctgagccttgggaacatgcgtgtgacctccacagctacctcttctatggactggttgttgccaaacagccacactgtgggactcttcttaacttaaattttaatttatttatactatttagtttttgtaatttattttcgatttcacagtgtgtttgtgattgtttgctctgagagttcccctgtcccctcccccttccctcacaccgcgtctggtgacaaccgagtggctgtcatcagcctgtgtaggcagtcatggcaccaaagccaccagactgacaaatgtgtatcggatgcttttgttcagggctgtgatcggcctggggaaataataaagatgctcttttaaaaggtaaa

SEQ ID NO: 446 - DNA, 5687 bp, Homo sapiens
  modified_base (4850)..(5163): a, t, c, g, other or unknown
ctctcacacacacacacccctcccctgccatccctccccggactccggctccggctccgattgcaatttgcaacctccgctgccgtcgccgcagcagccaccaattcgccagcggttcaggtggctcttgcctcgatgtcctagcctaggggcccccgggccggacttggctgggctcccttcaccctctgcggagtcatgagggcgaacgacgctctgcaggtgctgggcttgcttttcagcctggcccggggctccgaggtgggcaactctcaggcagtgtgtcctgggactctgaatggcctgagtgtgaccggcgatgctgagaaccaataccagacactgtacaagctctacgagaggtgtgaggtggtgatggggaaccttgagattgtgctcacgggacacaatgccgacctctccttcctgcagtggattcgagaagtgacaggctatgtcctcgtggccatgaatgaattctctactctaccattgcccaacctccgcgtggtgcgagggacccaggtctacgatgggaagtttgccatcttcgtcatgttgaactataacaccaactccagccacgctctgcgccagctccgcttgactcagctcaccgagattctgtcagggggtgtttatattgagaagaacgataagctttgtcacatggacacaattgactggagggacatcgtgagggaccgagatgctgagatagtggtgaaggacaatggcagaagctgtcccccctgtcatgaggtttgcaaggggcgatgctggggtcctggatcagaagactgccagacattgaccaagaccatctgtgctcctcagtgtaatggtcactgctttgggcccaaccccaaccagtgctgccatgatgagtgtgccgggggctgctcaggccctcaggacacagactgctttgcctgccggcacttcaatgacagtggagcctgtgtacctcgctgtccacagcctcttgtctacaacaagctaactttccagctggaacccaatccccacaccaagtatcagtatggaggagtttgtgtagccagctgtccccataactttgtggtggatcaaacatcctgtgtcagggcctgtcctcctgacaagatggaagtagataaaaatgggctcaagatgtgtgagccttgtgggggactatgtcccaaagcctgtgagggaacaggctctgggagccgcttccagactgtggactcgagcaacattgatggatttgtgaactgcaccaagatcctgggcaacctggactttctgatcaccggcctcaatggagacccctggcacaagatccctgccctggacccagagaagctcaatgtcttccggacagtacgggagatcacaggttacctgaacatccagtcctggccgccccacatgcacaacttcagtgttttttccaatttgacaaccattggaggcagaagcctctacaaccggggcttctcattgttgatcatgaagaacttgaatgtcacatctctgggcttccgatccctgaaggaaattagtgctgggcgtatctatataagtgccaataggcagctctgctaccaccactctttgaactggaccaaggtgcttcgggggcctacggaagagcgactagacatcaagcataatcggccgcgcagagactgcgtggcagagggcaaagtgtgtgacccactgtgctcctctgggggatgctggggcccaggccctggtcagtgcttgtcctgtcgaaattatagccgaggaggtgtctgtgtgacccactgcaactttctgaatggggagcctcgagaatttgcccatgaggccgaatgcttctcctgccacccggaatgccaacccatggagggcactgccacatgcaatgggctcgggctctgatacttgtgctcaatgtgcccattttcgagatgggccccactgtgtgagcagctgcccccatggagtcctaggtgccaagggcccaatctacaagtacccagatgttcagaatgaatgtcggcccctgccatgagaactgcacccaggggtgtaaaggaccagagcttcaagactgtttaggacaaacactggtgctgatcggcaaaacccatctgacaatggctttgacagtgatagcaggattggtagtgattttcatgatgctgggcggcacttttctctactggcgtgggcgccggattcagaataaaagggctatgaggcgatacttggaacggggtgagagcatagagcctctggaccccagtgagaaggctaacaaagtcttggccagaatcttcaaagagacagagctaaggaagcttaaagtgcttggctcgggtgtctttggaactgtgcacaaaggagtgtggatccctgagggtgaatcaatcaagattccagtctgcattaaagtcattgaggacaagagtggacggcagagttttcaagctgtgacagatcatatgctggccattggcagcctggaccatgcccacattgtaaggctcctgggactatgcccagggtcatctctgcagcttgtcactcaatatttgcctctgggttctctgctggatcatgtgagacaacaccggggggcactggggccacagctgctgctcaactggggagtacaaattgccaagggaatgtactaccttgaggaacatggtatggtgcatagaaacctggctgcccgaaacgtgctactcaagtcacccagtcaggttcaggtggcagattttggtgtggctgacctgctgcctcctgatgataagcagctgctatacagtgaggccaagactccaattaagtggatggcccttgagagtatccactttgggaaatacacacaccagagtgatgtctggagctatggtgtgacagtttgggagttgatgaccttcggggcagagccctatgcagggctacgattggctgaagtaccagacctgctagagaagggggagcggttggcacagccccagatctgcacaattgatgtctacatggtgatggtcaagtgttggatgattgatgagaacattcgcccaacctttaaagaactagccaatgagttcaccaggatggcccgagacccaccacggtatctggtcataaagagagagagtgggcctggaatagcccctgggccagagccccatggtctgacaaacaagaagctagaggaagtagagctggagccagaactagacctagacctagacttggaagcagaggaggacaacctggcaaccaccacactgggctccgccctcagcctaccagttggaacacttaatcggccacgtgggagccagagccttttaagtccatcatctggatacatgcccatgaaccagggtaatcttggggagtcttgccaggagtctgcagtttctgggagcagtgaacggtgcccccgtccagtctctctacacccaatgccacggggatgcctggcatcagagtcatcagaggggcatgtaacaggctctgaggctgagctccaggagaaagtgtcaatgtgtagaagccggagcaggagccggagcccacggccacgcggagatagcgcctaccattcccagcgccacagtctgctgactcctgttaccccactctccccacccgggttagaggaagaggatgtcaacggttatgtcatgccagatacacacctcaaaggtactccctcctcccgggaaggcaccctttcttcagtgggtctcagttctgtcctgggtactgaagaagaagatgaagatgaggagtatgaatacatgaaccggaggagaaggcacagtccacctcatccccctaggccaagttcccttgaggagctgggttatgagtacatggatgtggggtcagacctcagtgcctctctgggcagcacacagagttgcccactccaccctgtacccatcatgcccactgcaggcacaactccagatgaagactatgaatatatgaatcggcaacgagatggaggtggtcctgggggtgattatgcagccatgggggcctgcccagcatctgagcaagggtatgaagagatgagagcttttcaggggcctggacatcaggccccccatgtccattatgcccgcctaaaaactctacgtagcttagaggctacagactctgcctttgataaccctgattactggcatagcaggcttttccccaaggctaatgcccagagaacgtaactcctgctccctgtggcactcagggagcatttaatggcagctagtgcctttagagggtaccgtcttctccctattccctctctctcccaggtcccagccccttttccccagtcccagacaattccattcaatctttggaggcttttaaacattttgacacaaaattcttatggtatgtagccagctgtgcactttcttctctttcccaaccccaggaaaggttttccttattttgtgtgctttcccagtcccattcctcagcttcttcacaggcactcctggagatatgaaggattactctccatatcccttcctctcaggctcttgactacttggaactaggctcttatgtgtgcctttgtttcccatcagactgtcaagaagaggaaagggaggaaacctagcagaggaaagtgtaattttggtttatgactcttaaccccctagaaagacagaagcttaaaatctgtgaagaaagaggttaggagtagatattgattactatcataattcagcacttaactatgagccaggcatcatactaaacttcacctacattatctcacttagtcctttatcatccttaaaacaattctgtgacatacatattatctcattttnnnnnnnnnnnnnnnnnnnnnnnnnnnnnnnnnnnnnnnnnnnnnnnnnnnnnnnnnnnnnnnnnnnnnnnnnnnnnnnnnnnnnnnnnnnnnnnnnnnnnnnnnnnnnnnnnnnnnnnnnnnnnnnnnnnnnnnnnnnnnnnnnnnnnnnnnnnnnnnnnnnnnnnnnnnnnnnnnnnnnnnnnnnnnnnnnnnnnnnnnnnnnnnnnnnnnnnnnnnnnnnnnnnnnnnnnnnnnnnnnnnnnnnnnnnnnnnnnnnnnnnnnnnnnnnnnnnnnnnnnnnnnnnnnnnnnnnnnnnnnnnnnnnnnnnnnngccttaaagagatgaaataaattaagcagtagatccaggatgcaaaatcctcccaattcctgtgcatgtgctcttattgtaaggtgccaagaaaaactgatttaagttacagcccttgtttaaggggcactgtttcttgtttttgcactgaatcaagtctaaccccaacagccacatcctcctatacctagacatctcatctcaggaagtggtggtgggggtagtcagaaggaaaaataactggacatctttgtgtaaaccataatccacatgtgccgtaaatgatcttcactccttatccgagggcaaattcacaaggatccccaagatccacttttagaagccattctcatccagcagtgagaagcttccaggtaggacagaaaaaagatccagcttcagctgcacacctctgtccccttggatggggaactaagggaaaacgtctgttgtatcactgaagttttttgttttgtttttatacgtgtctgaataaaaatgccaaagttttttttcacaaaaaa

SEQ ID NO: 447 - DNA, 3382 bp, Homo sapiens
agacggtgctggtgactcgtccacactgctcgcttcggatactccaggcgtctcccgttgcggccgctccctgccttagaggccagccttggacacttgctgcccctttccagcccggattctgggatccttccctctgagccaacatctgggtcctgccttcgacaccaccccaaggcttcctaccttgcgtgcctggagtctgccccaggggcccttgtcctgggccatggcccagaagggggtcctggggcctgggcagctgggggctgtggccattctgctctatcttggattactccggtcggggacaggagcggaaggggcagaagctccctgcggtgtggccccccaagcacgcatcacaggtggcagcagtgcagtcgccggtcagtggccctggcaggtcagcatcacctatgaaggcgtccatgtgtgtggtggctctctcgtgtctgagcagtgggtgctgtcagctgctcactgcttccccagcgagcaccacaaggaagcctatgaggtcaagctgggggcccaccagctagactcctactccgaggacgccaaggtcagcaccctgaaggacatcatcccccaccccagctacctccaggagggctcccagggcgacattgcactcctccaactcagcagacccatcaccttctcccgctacatccggcccatctgcctccctgcagccaacgcctccttccccaacggcctccactgcactgtcactggctggggtcatgtggccccctcagtgagcctcctgacgcccaagccactgcagcaactcgaggtgcctctgatcagtcgtgagacgtgtaactgcctgtacaacatcgacgccaagcctgaggagccgcactttgtccaagaggacatggtgtgtgctggctatgtggaggggggcaaggacgcctgccagggtgactctgggggcccactctcctgccctgtggagggtctctggtacctgacgggcattgtgagctggggagatgcctgtggggcccgcaacaggcctggtgtgtacactctggcctccagctatgcctcctggatccaaagcaaggtgacagaactccagcctcgtgtggtgccccaaacccaggagtcccagcccgacagcaacctctgtggcagccacctggccttcagctctgccccagcccagggcttgctgaggcccatccttttcctgcctctgggcctggctctgggcctcctctccccatggctcagcgagcactgagctggccctacttccaggatggatgcatcacactcaaggacaggagcctggtccttccctgatggcctttggacccagggcctgacttgagccactccttccttcaggactctgcgggaggctggggccccatcttgatctttgagcccattcttctgggtgtgctttttgggaccatcactgagagtcaggagttttactgcctgtagcaatggccagagcctctggcccctcacccaccatggaccagcccattggccgagctcctggggagctcctgggacccttggctatgaaaatgagccctggctcccacctgtttctggaagactgctcccggcccgcctgcccagactgatgagcacatctctctgccctctccctgtgttctgggctggggccacctttgtgcagcttcgaggacaggaaaggccccaatcttgcccactggccgctgagcgcccccgagccctgactcctggactccggaggactgagcccccaccggaactgggctggcgcttggatctggggtgggagtaacagggcagaaatgattaaaatgtttgagcacaacttgccgtgcatgtgtgaagtgaaatgaagaacatccgctcttggcctccccttcccctccaaagtccagggccaccagaactgactttattaaaaaaatgacaaaacaggtctatacatatttacaggctgggagccaggaggctcaggtccgacagcaggggccaggctgctcacttcttggagagcttgacttgcttgtgcttggggggtgcccacttgaggcagacggagtccactgtgatgggtggtttcttatactgggcacttttgaggtgctcctccaccagcttgggtgtgacacagatcacgtgctggcccttccagtacttgaccatattgagggattgcagggtactgatgatgtcattttgggtgatactggtcatctggctgaggtccttgatggacagtgtgccccggaagtcccgcaggatctccagcagcacccaggaccagtagctgcggtagctgagcttgcccaggtcagacagcggcttctccggggagccgactgtgctctccagcttggagagctcataactgaaagcgatgaggaacttcccgtagccgcggcgttggtaggggggcaaggtcaggatgcaggccacattgtttccatccggggactccttctccttggagaagtagccaacaatgtgggccccctgccggtccacctcagtcaggatgtaaaagacgaacggctccacgtcaaagtacagtgtcttatggtccaggaaaagcttggccagcagacacaggttctgacagtaaatcttatggtctttgccatcaacttcgtacacggagatgttgctcttgcggtagatctctttcccggggggctgccgccactggcactgacccaagtggaagcggtagctcttctcatatttcatgtacttgaggcagtactcgcagagccagagcttgggctgtttcccatagtcttcggggaatggtgagaaataccaggcatcaatttcgtagttcccgatgtggatcttgtccacatacttcaccttggtgatcgcctcatgctccttctccaaggctgctgtggtggggtccatctctgcataagtcttctgcacatggttgatctcatcatgcttgcgcttttggttgcgagtgatcttgcgctcaggctgctctgcgagctcgctcaggtacttctctgagttcttctgtacagcatccttcactgtcttggtcagcgccagccggttcttgtctacccactcgtccagccgccggttaaagcccacgtagtgtacatagaattcctctcggccctcctggtcgttcactcgagactggatcacttcagcagaatgccaggtgctatccggtcgccggcacaggtacgtttctccgatctccaccgtgacttccggctcgccgcgcgccggggtcggcggagagacgcggcccggggatggggcggtcccctcagcggccgcattctccccgggcccgggctcgccctcccccgcgacccctgaagtccccgccgcaaccgccgcagcagctccctgtgcc

SEQ ID NO: 448 - DNA, 2035 bp, Homo sapiens
gctggaccaacggacggatgccatgagggctctgctgctcctggggttcctgctggtgagcttggagtcaacactttcgattccaccttgggaagcccccaaggagcataagtacaaagctgaagagcacacagtcgttctcactgtcaccggggagccctgccacttccccttccagtaccaccggcagctgtaccacaaatgtacccacaagggccggccaggccctcagccctggtgtgctaccacccccaactttgatcaggaccagcgatggggatactgtttggagcccaagaaagtgaaagaccactgcagcaaacacagcccctgccagaaaggagggacctgtgtgaacatgccaagcggcccccactgtctctgtccacaacacctcactggaaaccactgccagaaagagaagtgctttgagcctcagcttctccggtttttccacaagaatgagatatggtatagaactgagcaagcagctgtggccagatgccagtgcaagggtcctgatgcccactgccagcggctggccagccaggcctgccgcaccaacccgtgcctccatgggggtcgctgcctagaggtggagggccaccgcctgtgccactgcccggtgggctacaccggacccttctgcgacgtggacaccaaggcaagctgctatgatggccgcgggctcagctaccgcggcctggccaggaccacgctctcgggtgcgccctgtcagccgtgggcctcggaggccacctaccggaacgtgactgccgagcaagcgcggaactggggactgggcggccacgccttctgccggaacccggacaacgacatccgcccgtggtgcttcgtgctgaaccgcgaccggctgagctgggagtactgcgacctggcacagtgccagaccccaacccaggcggcgcctccgaccccggtgtcccctaggcttcatgtcccactcatgcccgcgcagccggcaccgccgaagcctcagcccacgacccggaccccgcctcagtcccagaccccgggagccttgccggcgaagcgggagcagccgccttccctgaccaggaacggcccactgagctgcgggcagcggctccgcaagagtctgtcttcgatgacccgcgtcgttggcgggctggtggcgctacgcggggcgcacccctacatcgccgcgctgtactggggccacagtttctgcgccggcagcctcatcgccccctgctgggtgctgacggccgctcactgcctgcaggaccggcccgcacccgaggatctgacggtggtgctcggccaggaacgccgtaaccacagctgtgagccgtgccagacgttggccgtgcgctcctaccgcttgcacgaggccttctcgcccgtcagctaccagcacgacctggctctgttgcgccttcaggaggatgcggacggcagctgcgcgctcctgtcgccttacgttcagccggtgtgcctgccaagcggcgccgcgcgaccctccgagaccacgctctgccaggtggccggctggggccaccagttcgagggggcggaggaatatgccagcttcctgcaggaggcgcaggtaccgttcctctccctggagcgctgctcagccccggacgtgcacggatcctccatcctccccggcatgctctgcgcagggttcctcgagggcggcaccgatgcgtgccagggtgattccggaggcccgctggtgtgtgaggaccaagctgcagagcgccggctcaccctgcaaggcatcatcagctggggatcgggctgtggtgaccgcaacaagccaggcgtctacaccgatgtggcctactacctggcctggatccgggagcacaccgtttcctgattgctcagggactcatctttccctccttggtgattccgcagtgagagagtggctggggcatggaaggcaagattgtgtcccattcccccagtgcggccagctccgcgccaggatggcgcaggaactcaataaagtgctttgaaaatgctgagaaaaaaaaaaaaa

SEQ ID NO: 449 - DNA, 3109 bp, Homo sapiens
gcttcagcgccccttccctcggccgacgtcccgggaccgccgctccgggggagacgtggcgtccgcagcccgcggggccgggcgagcgcaggacggcccggaagccccgcgggggatgcgccgagggccccgcgttcgcgccgcgcagagccaggcccgcggcccgagcccatgagcaccatgcgcctgctgacgctcgccctgctgttctcctgctccgtcgcccgtgccgcgtgcgaccccaagatcgtcaacattggcgcggtgctgagcacgcggaagcacgagcagatgttccgcgaggccgtgaaccaggccaacaagcggcacggctcctggaagattcagctcaatgccacctccgtcacgcacaagcccaacgccatccagatggctctgtcggtgtgcgaggacctcatctccagccaggtctacgccatcctagttagccatccacctacccccaacgaccacttcactcccacccctgtctcctacacagccggcttctaccgcatacccgtgctggggctgaccacccgcatgtccatctactcggacaagagcatccacctgagcttcctgcgcaccgtgccgccctactcccaccagtccagcgtgtggtttgagatgatgcgtgtctacagctggaaccacatcatcctgctggtcagcgacgaccacgagggccgggcggctcagaaacgcctggagacgctgctggaggagcgtgagtccaaggcagagaaggtgctgcagtttgacccagggaccaagaacgtgacggccctgctgatggaggcgaaagagctggaggcccgggtcatcatcctttctgccagcgaggacgatgctgccactgtataccgcgcagccgcgatgctgaacatgacgggctccgggtacgtgtggctggtcggcgagcgcgagatctcggggaacgccctgcgctacgccccagacggcatcctcgggctgcagctcatcaacggcaagaacgagtcggcccacatcagcgacgccgtgggcgtggtggcccaggccgtgcacgagctcctcgagaaggagaacatcaccgacccgccgcggggctgcgtgggcaacaccaacatctggaagaccgggccgctcttcaagagagtgctgatgtcttccaagtatgcggatggggtgactggtcgcgtggagttcaatgaggatggggaccggaagttcgccaactacagcatcatgaacctgcagaaccgcaagctggtgcaagtgggcatctacaatggcacccacgtcatccctaatgacaggaagatcatctggccaggcggagagacagagaagcctcgagggtaccagatgtccaccagactgaagattgtgacgatccaccaggagcccttcgtgtacgtcaagcccacgctgagtgatgggacatgcaaggaggagttcacagtcaacggcgacccagtcaagaaggtgatctgcaccgggcccaacgacacgtcgccgggcagcccccgccacacggtgcctcagtgttgctacggcttttgcatcgacctgctcatcaagctggcacggaccatgaacttcacctacgaggtgcacctggtggcagatggcaagttcggcacacaggagcgggtgaacaacagcaacaagaaggagtggaatgggatgatgggcgagctgctcagcgggcaggcagacatgatcgtggcgccgctaaccataaacaacgagcgcgcgcagtacatcgagttttccaagcccttcaagtaccagggcctgactattctggtcaagaaggagattccccggagcacgctggactcgttcatgcagccgttccagagcacactgtggctgctggtggggctgtcggtgcacgtggtggccgtgatgctgtacctgctggaccgcttcagccccttcggccggttcaaggtgaacagcgaggaggaggaggaggacgcactgaccctgtcctcggccatgtggttctcctggggcgtcctgctcaactccggcatcggggaaggcgcccccagaagcttctcagcgcgcatcctgggcatggtgtgggccggctttgccatgatcatcgtggcctcctacaccgccaacctggcggccttcctggtgctggaccggccggaggagcgcatcacgggcatcaacgaccctcggctgaggaacccctcggacaagtttatctacgccacggtgaagcagagctccgtggatatctacttccggcgccaggtggagctgagcaccatgtaccggcatatggagaagcacaactacgagagtgcggcggaggccatccaggccgtgagagacaacaagctgcatgccttcatctgggactcggcggtgctggagttcgaggcctcgcagaagtgcgacctggtgacgactggagagctgtttttccgctcgggcttcggcataggcatgcgcaaagacagcccctggaagcagaacgtctccctgtccatcctcaagtcccacgagaatggcttcatggaagacctggacaagacgtgggttcggtatcaggaatgtgactcgcgcagcaacgcccctgcgacccttacttttgagaacatggccggggtcttcatgctggtagctgggggcatcgtggccgggatcttcctgattttcatcgagattgcctacaagcggcacaaggatgctcgccggaagcagatgcagctggcctttgccgccgttaacgtgtggcggaagaacctgcaggatagaaagagtggtagagcagagcctgaccctaaaaagaaagccacatttagggctatcacctccaccctggcttccagcttcaagaggcgtaggtcctccaaagacacgagcaccgggggtggacgcggcgctttgcaaaaccaaaaagacacagtgctgccgcgacgcgctattgagagggaggagggccagctgcagctgtgttcccgtcatagggagagctgagactccccgcccgccctcctctgccccctcccccgcagacagacagacagacggacgggacagcggcccggcccacgcagagccccggagcaccacggggtcgggggaggagcacccccag

SEQ ID NO: 450 - DNA, 1758 bp, Homo sapiens
  modified_base (82): a, t, c, g, other or unknown
  modified_base (116): a, t, c, g, other or unknown
ggcgctcgatgtgctgttttgcacctcgtcgatcgtgcatctgtgtgccatcagcctggatcgctactggtcggtgacgcangccgtcgagtacaacctgaagcgcacaccacgcngcgtcaaggccaccatcgtcgccgtgtggctcatctcggccgtcatctccttcccgccgctggtctcgctctaccgccagcccgacggcgccgcctacccgcagtgcggcctcaacgacgagacctggtacatcctgtcctcctgcatcggctccttcttcgcgccctgcctcatcatgggcctggtctacgcgcgcatctaccgagtggccaagcgtcgcacgcgcacgctcagcgagaagcgcgcccccgtgggccccgacggtgcgtccccgactaccgaaaacgggctgggcgcggcggcaggcgaggcgagaacgggcactgcgcgcccccgcccgccgacgtggagccggacgagagcagcgcagcggccgagaggcggcgcgccggggccgttgcggcggggcgggcggcggcgagcgggcgcggaggggggcgcgggcggtgcggacgggcagggggcggggccgggggcggctcagtcgggggcgctgaccgcctccaggtccccggggcccggtggccgcctctcgcgcgccagctcgcgctccgtcgagttcttcctgtcgcgccggcgccgggcgcgcagcagcgtgtgccgccgcaaggtggcccaggcgcgcgagaagcgcttcacctttgtgctggctgtggtcatgggcgtgttcgtgctctgctggttccccttcttcttcagctacagcctgtacggcatctgccgcgaggcctgccaggtgcccggcccgctcttcaagttcttcttctggatcggctactgcaacagctcgctcaacccggtcatctacacggtcttcaaccaggatttccggcgatcctttaagcacatcctcttccgacggaggagaaggggcttcaggcagtgactcgcacccgtctgggaatcctggacagctccgcgctcggggctgggcagaaggggcggcccggacgggggagctttcccagagacccggggagctctcccagagacccggggatggattggcctccagggcgcaggggagggtgcggcagggcaggagcttggcagagagatagccgggctccagggagtggggaggagagagggggagacccctttgccttcccccctcagcaaggggctgcttctggggctccctgcctggatccagctctgggagccctgccgaggtgtggctgtgaggtcagggttttagagagcagtggcagaggtagccccctaaatgggcaagcaaggagccccccaaagacactaccactccccatccccgtctgaccaagggctgacttctccaggacctagtcggggggtggctgccagggggcaaggagaaagcaccgacaatctttgattactgaaagtatttaaatgtttgccaaaaacaacagccaaaacaaccaaactattttctaaataaacctttgtaatctaagattgtcggtgctttctccttgccccctggcagccaccccccgactaggtcctggagaagtcagcccttggtcagacggggatggggagtggtagtgtgtttcggggggctccttgctcgcccatttaggaagctacctctgacactgctctctaaaaccctgacctcacagccacacctcggcagggcccccacagctggat

SEQ ID NO: 451 - DNA, 1938 bp, Homo sapiens
attccggttgttgcaccatggcgtccatggggaccctcgccttcgatgaatatgggcgccctttcctcatcatcaaggatcaggaccgcaagtcccgtcttatgggacttgaggccctcaagtctcatataatggcagcaaaggctgtagcaaatacaatgagaacatcacttggaccaaatgggcttgataagatgatggtggataaggatggagatgtgactgtaactaatgatggggccaccatcttaagcatgatggatgttgatcatcagattgccaagctgatggtggaactgtccaagtctcaggatgatgaaattggagatggaaccacaggagtggttgtcctggctggtgccttgttagaagaagcggagcaattgctagaccgaggcattcacccaatcagaatagccgatggctatgagcaggctgctcgtgttgctattgaacacctggacaagatcagcgatagcgtccttgttgacataaaggacaccgaacccctgattcagacagcaaaaaccacgctgggctccaaagtggtcaacagttgtcaccgacagatggctgagattgctgtgaatgccgtcctcactgtagcagatatggagcggagagacgttgactttgagcttatcaaagtagaaggcaaagtgggcggcaggctggaggacactaaactgattaagggcgtgattgtggacaaggatttcagtcacccacagatgccaaaaaaagtggaagatgcgaagattgcaattctcacatgtccatttgaaccacccaaaccaaaaacaaagcataagctggatgtgacctctgtcgaagattataaagcccttcagaaatacgaaaaggagaaatttgaagagatgattcaacaaattaaagagactggtgctaacctagcaatttgtcagtggggctttgatgatgaagcaaatcacttacttcttcagaacaacttgcctgcggttcgctgggtaggaggacctgaaattgagctgattgccatcgcaacaggagggcggatcgtccccaggttctcagagctcacagccgagaagctgggctttgctggtcttgtacaggagatctcatttgggacaactaaggataaaatgctggtcatcgagcagtgtaagaactccagagctgtaaccatttttattagaggaggaaataagatgatcattgaggaggcgaaacgatcccttcacgatgctttgtgtgtcatccggaacctcatccgcgataatcgtgtggtgtatggaggaggggctgctgagatatcctgtgccctggcagttagccaagaggcggataagtgccccaccttagaacagtatgccatgagagcgtttgccgacgcactggaggtcatccccatggccctctctgaaaacagtggcatgaatcccatccagactatgaccgaagtccgagccagacaggtgaaggagatgaaccctgctcttggcatcgactgtttgcacaaggggacaaatgatatgaagcaacagcatgtcatagaaaccttgattggcaaaaagcaacagatatctcttgcaacacaaatggttagaatgattttgaagattgatgacattcgtaagcctggagaatctgaagaatgaagacattgagaaaactatgtagcaagatccacttctgtgattaagtaaatggatgtctcgtgatgcatctacagttatttattgttacatccttttccagacactgtagatgctataataaaaatagctgtttggtaaccatagtttcacttgttcaaagctgtgtaatcgtgggggtaccatctcaactgcttttgtattcattgtattaaaagaatctgtttaaacaacctttatcttctcttcgggtttaagaaacgtttattgtaacagtaattaaatgctgccttaattg

SEQ ID NO: 452 - DNA, 2006 bp, Homo sapiens
gcggcggcgcccgcagcaatcacagcagtgccgacgtcgtgggtgtttggtgtgaggctgcgagccgccgcgagttctcacggtcccgccggcgccaccaccgcggtcactcaccgccgccgccgccaccactgccaccacggtcgcctgccacaggtgtctgcaattgaactccaaggtgcagaatggtttggaaagtagctgtattcctcagtgtggccctgggcattggtgccgttcctatagatgatcctgaagatggaggcaagcactgggtggtgatcgtggcaggttcaaatggctggtataattataggcaccaggcagacgcgtgccatgcctaccagatcattcaccgcaatgggattcctgacgaacagatcgttgtgatgatgtacgatgacattgcttactctgaagacaatcccactccaggaattgtgatcaacaggcccaatggcacagatgtctatcagggagtcccgaaggactacactggagaggatgttaccccacaaaatttccttgctgtgttgagaggcgatgcagaagcagtgaagggcataggatccggcaaagtcctgaagagtggcccccaggatcacgtgttcatttacttcactgaccatggatctactggaatactggtttttcccaatgaagatcttcatgtaaaggacctgaatgagaccatccattacatgtacaaacacaaaatgtaccgaaagatggtgttctacattgaagcctgtgagtctgggtccatgatgaaccacctgccggataacatcaatgtttatgcaactactgctgccaaccccagagagtcgtcctacgcctgttactatgatgagaagaggtccacgtacctgggggactggtacagcgtcaactggatggaagactcggacgtggaagatctgactaaagagaccctgcacaagcagtaccacctggtaaaatcgcacaccaacaccagccacgtcatgcagtatggaaacaaaacaatctccaccatgaaagtgatgcagtttcagggtatgaaacgcaaagccagttctcccgtccccctacctccagtcacacaccttgacctcacccccagccctgatgtgcctctcaccatcatgaaaaggaaactgatgaacaccaatgatctggaggagtccaggcagctcacggaggagatccagcggcatctggatgccaggcacctcattgagaagtcagtgcgtaagatcgtctccttgctggcagcgtccgaggctgaggtggagcagctcctgtccgagagagccccgctcacggggcacagctgctacccagaggccctgctgcacttccggacccactgcttcaactggcactcccccacgtacgagtatgcgttgagacatttgtacgtgctggtcaacctttgtgagaagccgtatccgcttcacaggataaaattgtccatggaccacgtgtgccttggtcactactgaagagctgcctcctggaagcttttccaagtgtgagcgccccaccgactgtgtgctgatcagagactggagaggtggagtgagaagtctccgctgctcgggccctcctggggagcccccgctccagggctcgctccaggaccttcttcacaagatgacttgctcgctgttacctgcttccccagtcttttctgaaaaactacaaattagggtgggaaaagctctgtattgagaagggtcatatttgctttctaggaggtttgttgttttgcctgttagttttgaggagcaggaagctcatgggggcttctgtagcccctctcaaaaggagtctttattctgagaatttgaagctgaaacctctttaaatcttcagaatgattttattgaagagggccgcaagccccaaatggaaaactgtttttagaaaatatgatgatttttgattgcttttgtatttaattctgcaggtgttcaagtcttaaaaaataaagatttataacagaacccaaatattcacgt

SEQ ID NO: 453 - DNA, 2400 bp, Homo sapiens
  modified_base (220)..(221): a, t, c, g, other or unknown
  modified_base (256)..(257): a, t, c, g, other or unknown
cgaggaccggggctgtccgagatacggccttcatatccctcttcctcccctggactctttctgagctcagagccgccgcagccgggacaggagggcaggctttctccaaccatcatgctgcggagcatattacctgtacgccctggctccgggagcggcagtcgagtatcctctggtcaggcggcgcgggcggcgcctcagcggaagagcgggcctctgnnggccgcatgtgaccaacccccggccccctcacccnncacgtggttggaggtttccagaagcgctgccgccaccgcatcgcgcagctctttgccgtcggagcgcttgtttgctgcctcgtactcctccatttatccgccatgataagtgccagccgagctgcagcagcccgtctcgtgggcgccgcagcctcccggggccctacggccgcccgccaccaggatagctggaatggccttagtcatgaggcttttagacttgtttcaaggcgggattatgcatcagaagcaatcaagggagcagttgttggtattgatttgggtactaccaactcctgcgtggcagttatggaaggtaaacaagcaaaggtgctggagaatgccgaaggtgccagaaccaccccttcagttgtggcctttacagcagatggtgagcgacttgttggaatgccggccaagcgacaggctgtcaccaacccaaacaatacattttatgctaccaagcgtctcattggccggcgatatgatgatcctgaagtacagaaagacattaaaaatgttccctttaaaattgtccgtgcctccaatggtgatgcctgggttgaggctcatgggaaattgtattctccgagtcagattggagcatttgtgttgatgaagatgaaagagactgcagaaaattacttggggcacacagcaaaaaatgctgtgatcacagtcccagcttatttcaatgactcgcagagacaggccactaaagatgctggccagatatctggactgaatgtgcttcgggtgattaatgagcccacagctgctgctcttgcctatggtctagacaaatcagaagacaaagtcattgctgtatatgatttaggtggtggaacttttgatatttctatcctggaaattcagaaaggagtatttgaggtgaaatccacaaatggggataccttcttaggtggggaagactttgaccaggccttgctacggcacattgtgaaggagttcaagagagagacaggggttgatttgactaaagacaacatggcacttcagagggtacgggaagctgctgaaaaggctaaatgtgaactctcctcatctgtgcagactgacatcaatttgccctatcttacaatggattcttctggacccaagcatttgaatatgaagttgacccgtgctcaatttgaagggattgtcactgatctaatcagaaggactatcgctccatgccaaaaagctatgcaagatgcagaagtcagcaagagtgacataggagaagtgattcttgtgggtggcatgactaggatgcccaaggttcagcagactgtacaggatctttttggcagagccccaagtaaagctgtcaatcctgatgaggctgtggccattggagctgccattcagggaggtgtgttggccggcgatgtcacggatgtgctgctccttgatgtcactcccctgtctctgggtattgaaactctaggaggtgtctttaccaaacttattaataggaataccactattccaaccaagaagagccaggtattctctactgccgctgatggtcaaacgcaagtggaaattaaagtgtgtcagggtgaaagagagatggctggagacaacaaactccttggacagtttactttgattggaattccaccagcccctcgtggagttcctcagattgaagttacatttgacattgatgccaatgggatagtacatgtttctgctaaagataaaggcacaggacgtgagcagcagattgtaatccagtcttctggtggattaagcaaagatgatattgaaaatatggttaaaaatgcagagaaatatgctgaagaagaccggcgaaagaaggaacgagttgaagcagttaatatggctgaaggaatcattcacgacacagaaaccaagatggaagaattcaaggaccaattacctgctgatgagtgcaacaagctgaaagaagagatttccaaaatgagggagctcctggctagaaaagacagcgaaacaggagaaaatattagacaggcagcatcctctcttcagcaggcatcactgaagctgttcgaaatggcatacaaaaagatggcatctgagcgagaaggctctggaagttctgcactggggaacaaaggaagatcaaaaggaggaaaacagtataata

SEQ ID NO: 454 - DNA, 3202 bp, Homo sapiens
gccgcgcgcgccccgcagtttccgcgctaagggaacgagtgcgcggaggggacgagcggctggaccacagccggcgcccgatcaggatctccgcgctgggatcggtggaacttgaggcagcggcggcgcggggcgccatggcacaccgagcggctccgtcttctgctcctcagagagcccggctggcggcctgggatgacaagatgtctggactgcaatcctgcacagttttgagagggagatgacttgagtggttggcttttatctccacaacaatgtccatgaacaattccaaacagctagtgtctcctgcagctgcgcttctttcaaacacaacctgccagacggaaaaccggctttccgtatttttttcagtaatcttcatgacagtgggaatcttgtcaaacagccttgccatcgccattctcatgaaggcatatcagagatttagacagaagtccaaggcatcgtttctgcttttggccagcggcctggtaatcactgatttctttggccatctcatcaatggagccatagcagtatttgtatatgcttctgataaagaatggatccgctttgaccaatcaaatgtcctttgcagtatttttggtatctgcatggtgttttctggtctgtgcccacttcttctaggcagtgtgatggccattgagcggtgtattggagtcacaaaaccaatatttcattctacgaaaattacatccaaacatgtgaaaatgatgttaagtggtgtgtgcttgtttgctgttttcatagctttgctgcccatccttggacatcgagactataaaattcaggcgtcgaggacctggtgtttctacaacacagaagacatcaaagactgggaagatagattttatcttctacttttttcttttctggggctcttagcccttggtgtttcattgttgtgcaatgcaatcacaggaattacacttttaagagttaaatttaaaagtcagcagcacagacaaggcagatctcatcatttggaaatggtaatccagctcctggcgataatgtgtgtctcctgtatttgttggagcccatttctggttacaatggccaacattggaataaatggaaatcattctctggaaacctgtgaaacaacactttttgctctccgaatggcaacatggaatcaaatcttagatccttgggtatatattcttctacgaaaggctgtccttaagaatctctataagcttgccagtcaatgctgtggagtgcatgtcatcagcttacatatttgggagcttagttccattaaaaattccttaaaggttgctgctatttctgagtcaccagttgcagagaaatcagcaagcacctagcttaataggacagtaaatctgtgtggggctagaacaaaattaagacatgtttggcaatatttcagttagttaaatacctgtagcctaactggaaaattcaggcttcatcatgtagtttgaagatactattgtcagattcaggttttgaaatttgtcaaataaacaggataactgtacatttttcacttgtttttgccaatgggaggtagacacaataaaataatgccatgggagtcacactgaaagcaattttgagcttatctgtcttatttatgctttgagtgaatcatctgttgaggtctaatgcctttacttggcctatttgccagagaacatcttaatgcagcctgcatagtgaaatggttattttgagatcaccgctctgtagctaacccttataaactaggctcagtaaaataaagcactcttattttttgatctggcctattttgcccctcattgtgtagcctcaattaacacatgcatggtcatgacacccagaattcatgatggtttgttataacaacctctgcatattccaggtctggcagacaggttgcctgaccctgcaatcctatctagaatgggctcattcttgtcatatttgacaaataggactgcctacatttattattatgaaggtcgattgttgttggaagtgttttttcatgtcatagattagcaattttcaaataattattttttctctgaaaattttgtgtgtgattgcacaataaataatttttagagaaacaaaggctctttctcagcacattgatgggcaactagaattacagcagtttcaaaactctaccatggataatgcaaacaaaccgaagctacatgccaatgataggtgcaaagaatattggcaaaaggtgctttaccttgagccattatttgtgtcagagaacaaaagaaacagaatcaatatataaaattcaaagactatctgcagctagtgtgtttcttctttacacacatatacacacagacatcagaaaattctgttgagagcaggttcattaaatttgtaagatggcatattctaaagcctgtgctaccagtactaagaggggaagactggcaatttgccaagcacttggggattattataacaattaactaggagatcaagagataataatctctccccaaattttccaataataattgagactttttctttgcttgtttgtgtaattcaaccaaaagaatttcaatacccattcaaattgtcctaggtctatcagaaattagggaaggtagtcctgctttataataggaaaatgtatttctgtataagatttctttgctttcattaaaaatgggattcatttaaaaattaatcttccctgttaggctgatttcagattctctaggaaatctgtgtaagtaaccagaagacctttcagatggtttatttgctttcagcagagaatttatttcatacagttacttaagagtgttgatgtcttgtgaacagagatataaggaaccattctccatccttccttatcatgctgggtacaatgcttctatgaatatttccatgtattttgactggggagaggcatggagaagaaactctcattcaggggctccaggatccttctccttgaggcttctaaataaatggcagaattcttgctgtattgccatgatgtcaccctggccatgtgtactgacttgaggagatcttgcaacatggccatgtgcaaggctttaaggagtgagagagatgtgtacatatcttaggagggttatctatgttatctgagtatatgtttgggtaaccaaattggtcttaaaaatgatgttaacccaagaagtagacatcaaaaatt

SEQ ID NO: 455 - DNA, 7088 bp, Homo sapiens
  modified_base (3568)..(3592): a, t, c, g, other or unknown
cttccatcttccttttccctcttcctccccgcggggccgcactggcttcccaattctgtcttggttttctccatgtgagagaagagcatgcatcggaggggggagcagcctctagcatttgtcatcttcttccgtgtcacttagcaggttgttgacagccccacacatcatgcctggcccaggccccccgcgcctccgccgccgatagtgcccgttgggcatctgccagctatgccgcaggggtggggctgagccgatggtgttggaacggcccaggctagtagccacggctgcttcgaaagtgagcgtctcctcctcaacacagtctgaggcgtgggagtcttcgtgcagggccaagtagggctcggagatgtagcgctgtggggaggcatgttgcctctgctgggggtgcggagagttggaagactcggtcagccaagcattgttgctctccagagcttgggaggtcagcggggagccctcctcgcttccatcagcaggtggagagatgctgcccgcgtgtcgaatcagggagctgtaggaaaggaggggccggggctttggcgggacgggtgggagctgccgacgacttcttcttggggtgctggtgtcagagacagaggggatggagctctcacttagggaacctgtgccctgtctgttgggcgtctgtgacctgccctcactgggtgacctggattgacggcgctctggggactcccagtcagcctgggtccctcgctcttctgaattgcagcgggagacatcaggagagagaagatgctttcgctcttttgatcgtcgccgctccctgccccctgaggggtgagtgtcagacttgtggcctgaatcagagttcaggcggtgggctgacagccgcaaggaggagtggtaactccggcgacgggacttgtaggtattttcactgcttcgctccatggagaattcctccaaccacgaggaatttgaacgcttatcccgaatagtggaaaatgaacgtctcatggagctagggtctgtcaccaccagagactgccgttcttggaactgtccgtcatcggcggggtccatacaagccaactggaatatatcctggggagagagtggactcatcgaagggtatccactccggccactcaggcctgaaacggggtcctgctggaggtaaggcagggctttggcattagcaatgatctcctgaggcagagatgaaggctccatgcgctggaacatgggggcatttttctgttcctccagctgctgcctctgcttcttcaccttactctgcttatagtagtccatgatcatcattgctgcatagattttgcccacagtcaggtcagaggctttgggcatgggcacaagcagatccagcatcttctgggataggtgaggccagatggctagggtctccttttgtagctctgagtctagctgctgcctgtctgcaccacctttggcaattttaatgtccagagctgtccggatcagagccataagtgtggaggtgaagtggaccgtcatgtcctcagctactggcatgttcatcaggaccaacctcttatatgccactttggagggacatctcttgccgaggcctagcggaggtgacatgagagtcagcatttcatacatctcagtgtaatggatgcggccacatgctgctcggtcatattctgcccagacgcggacaaactcgtccaagtggtgaggccccaggatggaggagtcccgagtcaggtactcaaagttgtccatgatgacggccacaaacaggttgagcatcaagaaggagcagaagaagatgaaggagacaaagtacacgtaggccagatcggtgccgcagcgttcattctcgttctgccctgatggtgcggtggtgtcaggctcacagcccttctccccaaggcatgacagcataatctcctgccaggcctcacctgtggcactcctgaagagtagcattagggacccaaagaaactccggaagttgttgtgccggttgatgtgactctcctcgtctaattttatgtttccaaatacctgcatcccaatgatggcataaatgaagaaaagcatggcaattaaaaggcagacataagggagggccttaaaggactgcacaaaggtccacagcaaaatgcgtatggtatagccctgacgcaggagctttatgaggcgggcagctcggaagagcttcagaaagctcatattgaagccactggtgttcaccagcttgctgtctgtcaggataatttctgtgatactgccaatcacggtgatgaagtcaaagatattccaggtgtctcggaaatagttcaaaaagccaaaagcgatgaccttcaggacacattccagggaaaacaccatggtgaaggcgatattcaggtacttcagggccagctcataggtacagggagcagaataatacttcatcatcagcacaacagtattcaaggcgatcatggccataatggtgtactcaaaggacggagacaccacaaagtgccacacgcggtactggaaggtgtgtctgttctgcggcatgtagcgggtgagaggtttggcgctgatggcgaagtcgatgcacgccctctcattcttctccaggctgcactcctccatcatcttatccccttgctcctggaaggtgatgatgatgagagccacaaagatattgacaaagaagaaggggaagaccacaaagtagactacataaaagatagacatctccatgcggttgctgcggcttgggcctcggtcttcctctgtcacatctacagagtgctgcagaacttgaggccatccttcccctgtggagacggtgaagagggtcagcagggcccagataatgttgtcgtagtggaattcatggcgcttccattcccggcccttcacctccatcttgtttttctcgtgatctacatagttgcctatgcactccttctctgtgtccttggaactgtccgtgcaataaaagaactttcccttgaagagctgaactgcgatgacagcaaagatgaacatgaagagcttgtacacaatgagtatgttgaagacattcttcaaggaggtcactacgcagtcgaagacggccttgagcttgggcaagcgcttgatggttttcagtggccttagaactcggagcacccgcagagacttgatggtcttgatgtcccgtcctttgttggttcccaaagcgttcgccagagcaaaggccaccaatgcgccaacgaccaccacaaagtccaggatgttccacaagtctcggaagtaggacccatcctgcaggatcaagccttggtctatcatctttataaccatctcaaaggtgaacacgcccgtgaacacatagtcaaaatacctcaggactttgttgcgctccgagttggtcaggacggggtcctctgccgccagggcgatgctgctggctgcaatcaccaggaggatgcacatctcaaagtagcgcaggttcacgatgtagtggcaggccctccggatcgggttggtggtgctgaagatgaacattgagctgtggggcaccatggctttgcctgtctcacgcttnnnnnnnnnnnnnnnnnnnnnnnnnacctcctcctcatcctctctgatctctgcctccttcaagggactggcttccccatccgtcttgttgctaatgtgcaccacggttgagtccaccaaggggtccacgtcggggatggcgacggtgacgctggtgctctcggtggtggccttgtccgtgttggccgtgatgcaggagaggtcaggctcgctctggctgatgacccggcccatgtctagctgcacattccccagcagggcctgctcactgctgccttctggctcctgctccgtcagcaccacgtgcttccccacttccagctcaggatggggcaggactaggggggtgtcagcctcatcaaggcctcctgccagcccggagcctctggacaccatcagactgttggtcctccttaaatcctgggctctctcttcttggatcgttggctccttggcaccatggttgcccctgagctcatggtccttctccccttcagtgggcatggcttcatccagactgcgttcctggctggcagacctgctccgggaggctgaagaggactccttgccttctgtcctgacgcggcgatgccggctgcgccgttggctctgcctgtgcctggcccggtcctcaaaggtcaccacagcctctcctccccctgcctcctgctgagtcgggtcacagtttccatgacagggcctggccagccatggtggctcccgctggcccagggacaaaggggtcctctggttgtccagggcactggatcggtcccctccatcccccttgagggaccccccacggctgatgcgctcctcctcgaacttctccagggccaggcccagggccaggccctcaatggccctgggtcgccgataaaggctggggtgggcattgagcgggttgagggagctgagcgggttgagggggttgagcgggttcatggtcggcgcctcctctctgttgagggcctcctggctggacatctgcatgtgcttcctcagctggctggtacgctgctcccacacggacatgtggtgccggcgcctccgctccctcaggtggctgctgcgtggctcccacatcgacatgtggtgtcttctccttctgtctctttcgatcgaaggcatgttgggtgcagacatcgggctgacctccttggccttctgcagtgcatgtttctggttgaaggcctcttcttcctcctgttcatccttggtcagttcctgggcgttggcgagattatccacagcgatagccaagaacacattcagtagcgtgtagttgccaaacaaggtgagcacaatgaagtagatggcagaccacatgcctgagctgaccccaccctgggagcggatcccattgtacatcacctcattccagtcctcacccgtcaggatctggaacacagtcatgatggctgcagggaaggtatcaaaatttgccgaaggagtcccatcattaaagttaaacctgcctccaaataactgcattcctaggagagcaaagacaacgatgaagaggaagaggaggaaaagcaaactgatgatagacttcattgagctcatcaaggagaccaccaaattccgtagggaagcccaatacttggttattttaaatattcttagaagccggagggctcgcaagacactgattccaaaagacgtaccaggtctgaagattgcccagaccacttcaaagatactgcccactgtgaccccaaaatcaaagcagttgaatgaagagtgaaaataaaggcgaggccccatgccatacatcttcagggacatctccaagaggaagagtcccagaaacagaaattctgcatagtagaggaggtgggtgagccactggggctggttgtgatggacaatggccacacaggcagtgttgagtgccacaaggctcagcacaatccagtaaaacacctgggatttaaccatgtggcgaatggagatgcgcagaagcctttccttgtgccggaaataagagaccccgtctacctttgcacttttgatactggctcgggccagaggtgtgcccacagaggagatatcaacacagtgtcatcactggagtctcgagtcatggcctctgtccggctcctcttgatggttgcccttcgaagcacttctaaggcggatgttccagcatttttattttcttcagcgagcatgacttcctctgctttgtctatccaggcacggtagccattcagctcacgctcaatctgctgctggcgccgcagcttcatgaaagcccttcggttctccactctctctctctctttggcaaattccccggaaagcactcccaggactaggttgagaacaaagaaggatccaatgatgatgagggggatgaagtacagccaattccaggtggctcctaaggcatcattggtattgtacagcacagtggtccacccttccatggtgatgcactggaagacagtcagcacagcaaaaaggatgttatcaaactgggtgatcccatcattggggccgatccagtccttgcattcataaccagctgggcagccctgcacaccacatgggtgaggggggtcaaatccttctagaatacctgaattgttcatgaagcacgctcgatgtaacttgccactgtagaactccaaaccaatgatagcaaacatcaggatggcaaagaagagcagaaggccaatctgcagaagaggtaccatggccttcatgatggacttcaacacaatctgcaggctaggtatccctgacacgagcttcaaaggccgcaggacacgcacagcccggagggtcctcaggtccacgtgagtattgaagtgggttcctgcagtggccaggatgccactgaggaccacgatgaagtccatgacattccagccattgcggaggtaagagcccttatggaagatgaaccccagggccacaattttgatcccagcttcaaagcaaaagatcccaatgaaataaggttctgtcttctccagtcttcgggacatgggggtcttgtcatcctcaggaagatgctgctccagggccaggacgatgcagttggcaatgatggtggccaggatcatgtactcaaatggcggccaatcgatgagcttcttggcatatttcctgacaatgttatcttctccgaagatgaacagggatctgttgacggtgaaacagttctgccggacgggaatggggttgtacaaagccatagtccgcgccctctgtgctttcgtctgcttgtaggcggccgcctgccccgaggccggcacgggggttccttgccggttcctgctctggtccgagtctccatcgccggaccctggcctggcgaccaccgcctccccgaagcgagccatcctgaggtttaaacagacagaagacacacaaaggtgatcgcggccgaacacccgcacacagcaacaagcagaaagacacacggagactcagagccgcatccagacaagcacggggaccaccgcctctggggagctccgcgagctcttcggagaggcagcagcagc

SEQ ID NO: 456 - DNA, 2980 bp, Homo sapiens
  modified_base (2193)..(2492): a, t, c, g, other or unknown
gcggagagaggtgccgccgcccgccccgtccagtcgccgcgcgcaggcactgcagtcagcggtgaactgacttcatcccaatccctcagcccccaccaggaccagtctggagtccctcccctgcccccattgaaatttcccttccgtccccaaacttacctctgatctagaccttactcacctccttcctgtttcctaagactccttcctgccgtccacagaccgagccttttatctttgtccaccctgtgccagacacctccttttccagaaccttctccttactggtgaccttacttatctctgttgctttctggggtcctaggaaatgccagcactcccacccacattgcctgaactttccaacactccctaactgcgctgtgtcctatctcaacactttctcatgtatttcttgtgtcttctagaacattcccccgccattattacttcaatatggctacacatacttcctaattgccctgcaaaccatctccttctcaccattgcccagcgatgctttcgtctcctccataaacactcccggagaccaatttttgtgtcacccccatactccctcgttgacacactgactccatacataacctccttgaaaaacctctttattaatctcaccatcctccagacttccctcctgtcataattccatccctcctccaacttttccctctcaagctctgcccttcccagcccagcccagcctacccaacctcatctcttccctgtagaccacatcccaccatgttcccctgagcctccaaggaaggggctcagggggccccatggcctcccgctccctgtggccccacagcccccgtgggccaggggaagcgccccagaagccgaagtgcccaccatgggcaaccacacgtgggagggctgccacgtggactcgcgcgtggaccacctctttccgccatccctctacatctttgtcatcggcgtggggctgcccaccaactgcctggctctgtgggcggcctaccgccaggtgcaacagcgcaacgagctgggcgtctacctgatgaacctcagcatcgccgacctgctgtacatctgcacgctgccgctgtgggtggactacttcctgcaccacgacaactggatccacggccccgggtcctgcaagctctttgggttcatcttctacaccaatatctacatcagcatcgccttcctgtgctgcatctcggtggaccgctacctggctgtggcccacccactccgcttcgcccgcctgcgccgcgtcaagaccgccgtggccgtgagctccgtggtctgggccacggagctgggcgccaactcggcgcccctgttccatgacgagctcttccgagaccgctacaaccacaccttctgctttgagaagttccccatggaaggctgggtggcctggatgaacctctatcgggtgttcgtgggcttcctcttcccgtgggcgctcatgctgctgtcgtaccggggcatcctgcgggccgtgcggggcagcgtgtccaccgagcgccaggagaaggccaagatcaagcggctggccctcagcctcatcgccatcgtgctggtctgctttgcgccctatcacgtgctcttgctgtcccgcagcgccatctacctgggccgcccctgggactgcggcttcgaggagcgcgtcttttctgcataccacagctcactggctttcaccagcctcaactgtgtggcggaccccatcctctactgcctggtcaacgagggcgcccgcagcgatgtggccaaggccctgcacaacctgctccgctttctggccagcgacaagccccaggagatggccaatgcctcgctcaccctggagaccccactcacctccaagaggaacagcacagccaaagccatgactggcagctgggcggccactccgccctcccagggggaccaggtgcagctgaagatgctgccgccagcacaatgaaccccgagtggcacagaatccccagttttcccctctcatcccacagtcccttctctcctggtctggtgtatgcaaattgtatggaaaaagggctgtgttaatattcataagaatacaagaacttaggaagagtgaggttggtgtgtcactggtcaacctttgtgctcccagatcccatcacagtttggcgattgtggagggcctcctgaaggaggagatgagtaaannnnnnnnnnnnnnnnnnnnnnnnnnnnnnnnnnnnnnnnnnnnnnnnnnnnnnnnnnnnnnnnnnnnnnnnnnnnnnnnnnnnnnnnnnnnnnnnnnnnnnnnnnnnnnnnnnnnnnnnnnnnnnnnnnnnnnnnnnnnnnnnnnnnnnnnnnnnnnnnnnnnnnnnnnnnnnnnnnnnnnnnnnnnnnnnnnnnnnnnnnnnnnnnnnnnnnnnnnnnnnnnnnnnnnnnnnnnnnnnnnnnnnnnnnnnnnnnnnnnnnnnnnnnnnnnnnnnnnnnnnnnnnnnnnnnnnnnnnnngataaattaagtcaaacatttggtttccagaaaataaagacaaatagagaaggttagatttttttttttccaacaagtggataaaagtctgtgactcgggggaaagtggaaggagaaatgcagccgatatagagtcattatgtttgcaaagcccctggtcatacaggccagggaacataagaccgcaattctaagtttctagataaacagcgatctccaagtcaagactgaggatgaagagggagaatgtcagaactcaagtgaagggcaatcagggcagactgcctggaggagtgatgccggaaggtttgggaagaaggtgtgggacaagaagaaagggtatttattcattcattcaacagaggtttatgtagggcactgtgctgggtggggctggggacacaacaatgactgaggcagcctggccttgccttcacagggctcaccatacacaagtaaataaaaaatatgtaatgtttggaattgct

SEQ ID NO: 457 - DNA, 2201 bp, Homo sapiens
  modified_base (1432)..(1467): a, t, c, g, other or unknown
gcaggtctgagagttagggaaagtccgttcccactgccctcggggagagaagaaaggagggggcaagggagaagctgctggtcggactcacaatgaaaacgctccttcttttgctgctggtgctcctggagctgggagaggcccaaggatcccttcacagggtgcccctcaggaggcatccgtccctcaagaagaagctgcgggcacggagccagctctctgagttctggaaatcccataatttggacatgatccagttcaccgagtcctgctcaatggaccagagtgccaaggaacccctcatcaactacttggatatggaatacttcggcactatctccattggctccccaccacagaacttcactgtcatcttcgacactggctcctccaacctctgggtcccctctgtgtactgcactagcccagcctgcaagacgcacagcaggttccagccttcccagtccagcacatacagccagccaggtcaatctttctccattcagtatggaaccgggagcttgtccgggatcattggagccgaccaagtctctgtggaaggactaaccgtggttggccagcagtttggagaaagtgtcacagagccaggccagacctttgtggatgcagagtttgatggaattctgggcctgggatacccctccttggctgtgggaggagtgactccagtatttgacaacatgatggctcagaacctggtggacttgccgatgttttctgtctacatgagcagtaacccagaaggtggtgcggggagcgagctgatttttggaggctacgaccactcccatttctctgggagcctgaattgggtcccagtcaccaagcaagcttactggcagattgcactggataacatccaggtgggaggcactgttatgttctgctccgagggctgccaggccattgtggacacagggacttccctcatcactggcccttccgacaagattaagcagctgcaaaacgccattggggcagcccccgtggatggagaatatgctgtggagtgtgccaaccttaacgtcatgccggatgtcaccttcaccattaacggagtcccctataccctcagcccaactgcctacaccctactggacttcgtggatggaatgcagttctgcagcagtggctttcaaggacttgacatccaccctccagctgggcccctctggatcctgggggatgtcttcattcgacagttttactcagtctttgaccgtgggaataaccgtgtgggactggccccagcagtcccctaaggaggggccttgtgtctgtgcctgcctgtctgacagaccttgaatatgttaggctggggcattctttacacctacaaaaagttattttccagagaatgtagctgtttccagggttgcaacttgaattaagaccaaacagaacatgagannnnnnnnnnnnnnnnnnnnnnnnnnnnnnnnnnnnttcacacatacacaccactcccaccaccgtcatgatggaggaattacgttatacattcatattttgtattgatttttgattatgaaaatcaaaaattttcacatttgattatgaaaatctccaaacatatgcacaagcagagatcatggtataataaatccctttgcaactccactcagccctgacaacccatccacacacggccaggcctgtttatctacactgctgcccactcctctctccagctccacatgctgtacctggatcattctgaagcaaattccgagcattacatcattttgtccataaatatttctaacatccttaaatatacaatcggaattcaagcatctcccattgtcccacaaatgtttggctgtttttgtagttggattgtttgtattaggattcaagcaaggcccatatattgcatttatttgaaatgtctgtaagtctctttccatctacagagtttagcacatttgaacgttgctggttgaaatcccgaggtgtcatttgacatggttctctgaacttatctttcctataaaatggtagttagatctggaggtctgattttgtggcaaaaatacttcctaggtggtgctgggtacttcttgttgcatcctgtcaggaggcagataatgctggtgcctctctattggtaatgttaagactgctgggtgggtttggagttcttggctttaatcattcattacaaagttcagcatttt

SEQ ID NO: 458 - DNA, 2336 bp, Homo sapiens
gaccgcagccccggagcccgggccagggtccacctgtccccgcagcgccggctcgcgccctcctgccgcagccaccgagccgccgtctagcgccccgacctcgccaccatgagagccctgctggcgcgcctgcttctctgcgtcctggtcgtgagcgactccaaaggcagcaatgaacttcatcaagttccatcgaactgtgactgtctaaatggaggaacatgtgtgtccaacaagtacttctccaacattcactggtgcaactgcccaaagaaattcggagggcagcactgtgaaatagataagtcaaaaacctgctatgaggggaatggtcacttttaccgaggaaaggccagcactgacaccatgggccggccctgcctgccctggaactctgccactgtccttcagcaaacgtaccatgcccacagatctgatgctcttcagctgggcctggggaaacataattactgcaggaacccagacaaccggaggcgaccctggtgctatgtgcaggtgggcctaaagccgcttgtccaagagtgcatggtgcatgactgcgcagatggaaaaaagccctcctctcctccagaagaattaaaatttcagtgtggccaaaagactctgaggccccgctttaagattattgggggagaattcaccaccatcgagaaccagccctggtttgcggccatctacaggaggcaccgggggggctctgtcacctacgtgtgtggaggcagcctcatcagcccttgctgggtgatcagcgccacacactgcttcattgattacccaaagaaggaggactacatcgtctacctgggtcgctcaaggcttaactccaacacgcaaggggagatgaagtttgaggtggaaaacctcatcctacacaaggactacagcgctgacacgcttgctcaccacaatgacattgccttgctgaagatccgttccaaggagggcaggtgtgcgcagccatcccggactatacagaccatctgcctgccctcgatgtataacgatccccagtttggcacaagctgtgagatcactggctttggaaaagagaattctaccgactatctctatccggagcagctgaaaatgactgttgtgaagctgatttcccaccgggagtgtcagcagccccactactacggctctgaagtcaccaccaaaatgctgtgtgctgctgacccacagtggaaaacagattcctgccagggagactcagggggacccctcgtctgttccctccaaggccgcatgactttgactggaattgtgagctggggccgtggatgtgccctgaaggacaagccaggcgtctacacgagagtctcacacttcttaccctggatccgcagtcacaccaaggaagagaatggcctggccctctgagggtccccagggaggaaacgggcaccacccgctttcttgctggttgtcatttttgcagtagagtcatctccatcagctgtaagaagagactgggaagataggctctgcacagatggatttgcctgtgccacccaccagggcgaacgacaatagctttaccctcaggcataggcctgggtgctggctgcccagacccctctggccaggatggaggggtggtcctgactcaacatgttactgaccagcaacttgtctttttctggactgaagcctgcaggagttaaaaagggcagggcatctcctgtgcatgggtgaagggagagccagctcccccgacggtgggcatttgtgaggcccatggttgagaaatgaataatttcccaattaggaagtgtaacagctgaggtctcttgagggagcttagccaatgtgggagcagcggtttggggagcagagacactaacgacttcagggcagggctctgatattccatgaatgtatcaggaaatatatatgtgtgtgtatgtttgcacacttgtgtgtgggctgtgagtgtaagtgtgagtaagagctggtgtctgattgttaagtctaaatatttccttaaactgtgtggactgtgatgccacacagagtggtctttctggagaggttataggtcactcctggggcctcttgggtcccccacgtgacagtgcctgggaatgtattattctgcagcatgacctgtgaccagcactgtctcagtttcactttcacatagatgtccctttcttggccagttatcccttccttttagcctagttcatccaatcctcactgggtggggtgaggaccactccttacactgaatatttatatttcactatttttatttatatttttgtaattttaaataaaagtgatcaataaaatgtgatttttctgatgac

SEQ ID NO: 459 - DNA, 1711 bp, Homo sapiens
  modified_base (1706): a, t, c, g, other or unknown
tgtttttataaaagtccggccgcggcagaaacttcagttgttggctgcggcagcaggtagcaaagtgacgccgagggcctgagtgctccagtagccaccgcatctggagaaccagcggttaccatggaggggatcagtatatacacttcagataactacaccgaggaaatgggctcaggggactatgactccatgaaggaaccctgtttccgtgaagaaaatgctaatttcaataaaatcttcctgcccaccatctactccatcatcttcttaactggcattgtgggcaatggattggtcatcctggtcatgggttaccagaagaaactgagaagcatgacggacaagtacaggctgcacctgtcagtggccgacctcctctttgtcatcacgcttcccttctgggcagttgatgccgtggcaaactggtactttgggaacttcctatgcaaggcagtccatgtcatctacacagtcaacctctacagcagtgtcctcatcctggccttcatcagtctggaccgctacctggccatcgtccacgccaccaacagtcagaggccaaggaagctgttggctgaaaaggtggtctatgttggcgtctggatccctgccctcctgctgactattcccgacttcatctttgccaacgtcagtgaggcagatgacagatatatctgtgaccgcttctaccccaatgacttgtgggtggttgtgttccagtttcagcacatcatggttggccttatcctgcctggtattgtcatcctgtcctgctattgcattatcatctccaagctgtcacactccaagggccaccagaagcgcaaggccctcaagaccacagtcatcctcatcctggctttcttcgcctgttggctgccttactacattgggatcagcatcgactccttcatcctcctggaaatcatcaagcaagggtgtgagtttgagaacactgtgcacaagtggatttccatcaccgaggccctagctttcttccactgttgtctgaaccccatcctctatgctttccttggagccaaatttaaaacctctgcccagcacgcactcacctctgtgagcagagggtccagcctcaagatcctctccaaaggaaagcgaggtggacattcatctgtttccactgagtctgagtcttcaagttttcactccagctaacacagatgtaaaagacttttttttatacgataaataacttttttttaagttacacatttttcagatataaaagactgaccaatattgtacagtttttattgcttgttggatttttgtcttgtgtttctttagtttttgtgaagtttaattgacttatttatataaattttttttgtttcatattgatgtgtgtctaggcaggacctgtggccaagttcttagttgctgtatgtctcgtggtaggactgtagaaaagggaactgaacattccagagcgtgtagtgaatcacgtaaagctagaaatgatccccagctgtttatgcatagataatctctccattcccgtggaacgtttttcctgttcttaagacgtgattttgctgtagaagatggcacttataaccaaagcccaaagtggtatagaaatgctggtttttcagttttcaggagtgggttgatttcagcacctacagtgtacagtcttgtattaagttgttaataaaagtacatgttaaacttaaaanaaaaa

SEQ ID NO: 460 - DNA, 2269 bp, Homo sapiens
tgggttggtgtttatctcctcccagccttgagggagggaacaacactgtaggatctggggagagaggaacaaaggaccgtgaaagctgctctgtaaaagctgacacagccctcccaagtgagcaggactgttcttcccactgcaatctgacagtttactgcatgcctggagagaacacagcagtaaaaaccaggtttgctactggaaaaagaggaaagagaagactttcattgacggacccagccatggcagcgtagcagccctgcgtttcagacggcagcagctcgggactctggacgtgtgtttgccctcaagtttgctaagctgctggtttattactgaagaaagaatgtggcagattgttttctttactctgagctgtgatcttgtcttggccgcagcctataacaactttcggaagagcatggacagcataggaaagaagcaatatcaggtccagcatgggtcctgcagctacactttcctcctgccagagatggacaactgccgctcttcctccagcccctacgtgtccaatgctgtgcagagggacgcgccgctcgaatacgatgactcggtgcagaggctgcaagtgctggagaacatcatggaaaacaacactcagtggctaatgaagcttgagaattatatccaggacaacatgaagaaagaaatggtagagatacagcagaatgcagtacagaaccagacggctgtgatgatagaaatagggacaaacctgttgaaccaaacagctgagcaaacgcggaagttaactgatgtggaagcccaagtattaaatcagaccacgagacttgaacttcagctcttggaacactccctctcgacaaacaaattggaaaaacagattttggaccagaccagtgaaataaacaaattgcaagataagaacagtttcctagaaaagaaggtgctagctatggaagacaagcacatcatccaactacagtcaataaaagaagagaaagatcagctacaggtgttagtatccaagcaaaattccatcattgaagaactagaaaaaaaaatagtgactgccacggtgaataattcagttcttcaaaagcagcaacatgatctcatggagacagttaataacttactgactatgatgtccacatcaaactcagctaaggaccccactgttgctaaagaagaacaaatcagcttcagagactgtgctgaagtattcaaatcaggacacaccacaaatggcatctacacgttaacattccctaattctacagaagagatcaaggcctactgtgacatggaagctggaggaggcgggtggacaattattcagcgacgtgaggatggcagcgttgattttcagaggacttggaaagaatataaagtgggatttggtaacccttcaggagaatattggctgggaaatgagtttgtttcgcaactgactaatcagcaacgctatgtgcttaaaatacaccttaaagactgggaagggaatgaggcttactcattgtatgaacatttctatctctcaagtgaagaactcaattataggattcaccttaaaggacttacagggacagccggcaaaataagcagcatcagccaaccaggaaatgattttagcacaaaggatggagacaacgacaaatgtatttgcaaatgttcacaaatgctaacaggaggctggtggtttgatgcatgtggtccttccaacttgaacggaatgtactatccacagaggcagaacacaaataagttcaacggcattaaatggtactactggaaaggctcaggctattcgctcaaggccacaaccatgatgatccgaccagcagatttctaaacatcccagtccacctgaggaactgtctcgaactattttcaaagacttaagcccagtgcactgaaagtcacggctgcgcactgtgtcctcttccaccacagagggcgtgtgctcggtgctgacgggacccacatgctccagattagagcctgtaaactttatcacttaaacttgcatcacttaacggaccaaagcaagaccctaaacatccataattgtgattagacagaacacctatgcaaagatgaacccgaggctgagaatcagactgacagtttacagacgctgctgtcacaaccaagaatgttatgtgcaagtttatcagtaaataactggaaaacagaacacttatgttatacaatacagatcatcttggaactgcattcttctgagcactgtttatacactgtgtaaatacccatatgtcct

SEQ ID NO: 461 - DNA, 5346 bp, Homo sapiens
ccgcgctcgccttccttgcagccgcgcctcggccccatggacgccctgtgcggttccggggagctcggctccaagttctgggactccaacctgtctgtgcacacagaaaacccggacctcactccctgcttccagaactccctgctggcctgggtgccctgcatctacctgtgggtcgccctgccctgctacttgctctacctgcggcaccattgtcgtggctacatcatcctctcccacctgtccaagctcaagatggtcctgggtgtcctgctgtggtgcgtctcctgggcggaccttttttactccttccatggcctggtccatggccgggcccctgcccctgttttctttgtcacccccttggtggtgggggtcaccatgctgctggccaccctgctgatacagtatgagcggctgcagggcgtacagtcttcgggggtcctcattatcttctggttcctgtgtgtggtctgcgccatcgtcccattccgctccaagatccttttagccaaggcagagggtgagatctcagaccccttccgcttcaccaccttctacatccactttgccctggtactctctgccctcatcttggcctgcttcagggagaaacctccatttttctccgcaaagaatgtcgaccctaacccctaccctgagaccagcgctggctttctctcccgcctgtttttctggtggttcacaaagctgctaaaccctgaccctctgcggggctgcctgccgggcttcacctccccccaggatggccatctatggctaccggcatcccctggaggagaaggacctctggtccctaaaggaagaggacagatcccagatggtggtgcagcagctgctggaggcatggaggaagcaggaaaagcagacggcacgacacaaggcttcagcagcacctgggaaaaatgcctccggcgaggacgaggtgctgctgggtgcccggcccaggccccggaagccctccttcctgaaggccctgctggccaccttcggctccagcttcctcatcagtgcctgcttcaagcttatccaggacctgctctccttcatcaatccacagctgctcagcatcctgatcaggtttatctccaaccccatggccccctcctggtggggcttcctggtggctgggctgatgttcctgtgctccatgatgcagtcgctgatcttacaacactattaccactacatctttgtgactggggtgaagtttcgtactgggatcatgggtgtcatctacaggaaggctctggttatcaccaactcagtcaaacgtgcgtccactgtgggggaaattgtcaacctcatgtcagtggatgcccagcgcttcatggaccttgcccccttcctcaatctgctgtggtcagcacccctgcagatcatcctggcgatctacttcctctggcagaacctaggtccctctgtcctggctggagtcgctttcatggtcttgctgattccactcaacggagctgtggccgtgaagatgcgcgccttccaggtaaagcaaatgaaattgaaggactcgcgcatcaagctgatgagtgagatcctggacggcatcaaggtgctgaagctgtacgcctgggagcccagcttcctgaagcaggtggagggcatcaggcagggtgagccccagctgctgcgcacggcggcctacctccacaccacaaccaccttcacctggatgtgcagccccttcctggtgaccctgatcaccctctgggtgtacgtgtacgtggacccaaacaatgtgctggacgccgagaaggcctttgtgtctgtgtccttgtttaatatcttaagacttcccctcaacatgctgccccagttaatcagcaacctgactcaggccagtgtgtctctgaaacggatccagcaattcctgagccaagaggaacttgacccccagagtgtggaaagaaagaccatctccccaggctatgccatcaccatacacagtggcaccttcacctgggcccaggacctgccccccactctgcacagcctagacatccaggtcccgaaaggggcactggtggccgtggtggggcctgtgggctgtgggaagtcctccctggtgtctgccctgctgggagagatggagaagctagaaggcaaagtgcacatgaagggctccgtggcctatgtgccccagcaggcatggatccagaactgcactcttcaggaaaacgtgcttttcggcaaagccctgaaccccaagcgctaccagcagactctggaggcctgtgccttgctagctgacctggagatgctgcctggtggggatcagacagagattggagagaagggcattaacctgtctgggggccagcggcagcgggtcagtctggctcgagctgtttacagtgatgccgatattttcttgctggatgacccactgtccgcggtggactctcatgtggccaagcacatctttgaccacgtcatcgggccagaaggcgtgctggcaggcaagacgcgagtgctggtgacgcacggcattagcttcctgccccagacagacttcatcattgtgctagctgatggacaggtgtctgagatgggcccgtacccagccctgctgcagcgcaacggctcctttgccaactttctctgcaactatgcccccgatgaggaccaagggcacctggaggacagctggaccgcgttggaaggtgcagaggataaggaggcactgctgattgaagacacactcagcaaccacacggatctgacagacaatgatccagtcacctatgtggtccagaagcagtttatgagacagctgagtgccctgtcctcagatggggagggacagggtcggcctgtaccccggaggcacctgggtccatcagagaaggtgcaggtgacagaggcgaaggcagatggggcactgacccaggaggagaaagcagccattggcactgtggagctcagtgtgttctgggattatgccaaggccgtggggctctgtaccacgctggccatctgtctcctgtatgtgggtcaaagtgcggctgccattggagccaatgtgtggctcagtgcctggacaaatgatgccatggcagacagtagacagaacaacacttccctgaggctgggcgtctatgctgctttaggaattctgcaagggttcttggtgatgctggcagccatggccatggcagcgggtggcatccaggctgcccgtgtgttgcaccaggcactgctgcacaacaagatacgctcgccacagtccttctttgacaccacaccatcaggccgcatcctgaactgcttctccaaggacatctatgtcgttgatgaggttctggcccctgtcatcctcatgctgctcaattccttcttcaacgccatctccactcttgtggtcatcatggccagcacgccgctcttcactgtggtcatcctgcccctggctgtgctctacaccttagtgcagcgcttctatgcagccacatcacggcaactgaagcggctggaatcagtcagccgctcacctatctactcccacttttcggagacagtgactggtgccagtgtcatccgggcctacaaccgcagccgggattttgagatcatcagtgatactaaggtggatgccaaccagagaagctgctacccctacatcatctccaaccggtcagaagccgcctccctcgctccctgctcctccaggaattcccagcaggctctctggtgttcagggtccttgtccctcctttcccctaagcagaaaactggccctgccctgcccctgccccatttcctcctcatctgatcccccataggtggctgagcatcggagtggagttcgtggggaactgcgtggtgctctttgctgcactatttgccgtcatcgggaggagcagcctgaacccggggctggtgggcctttctgtgtcctactccttgcaggtgacatttgctctgaactggatgatacgaatgatgtcagatttggaatctaacatcgtggctgtggagagggtcaaggagtactccaagacagagacagaggcgccctgggtggtggaaggcagccgccctcccgaaggttggcccccacgtggggaggtggagttccggaattattctgtgcgctaccggccgggcctagacctggtgctgagagacctgagtctgcatgtgcacggtggcgagaaggtggggatcgtgggccgcactggggctggcaagtcttccatgaccctttgcctgttccgcatcctggaggcggcaaagggtgaaatccgcattgatggcctcaatgtggcagacatcggcctccatgacctgcgctctcagctgaccatcatcccgcaggaccccatcctgttctcggggaccctgcgcatgaacctggaccccttcggcagctactcagaggaggacatttggtgggctttggagctgtcccacctgcacacgtttgtgagctcccagccggcaggcctggacttccagtgctcagagggcggggagaatctcagcgtgggccagaggcagctcgtgtgcctggcccgagccctgctccgcaagagccgcatcctggttttagacgaggccacagctgccatcgacctggagactgacaacctcatccaggctaccatccgcacccagtttgatacctgcactgtcctgaccatcgcacaccggcttaacactatcatggactacaccagggtcctggtcctggacaaaggagtagtagctgaatttgattctccagccaacctcattgcagctagaggcatcttctacgggatggccagagatgctggacttgcctaaaatatattcctgagatttcctcctggcctttcctggttttcatcaggaaggaaatgacaccaaatatgtccgcagaatggacttgatagcaaacactgggggcaccttaagattttgcacctgtaaagtgccttacagggtaactgtgctgaatgctttagatgaggaaatgatccccaagtggtgaatgacacgcctaaggtcacagctagtttgagccagttagactagtcccccggtctcccgattcccaactgagtgttatttgcacactgcactgttttcaaataacgattttatgaaatgacctctgtcctccctctgatttttcatattttcctaaagtttcgtttctgttttttaataaaaagctttttcctcctggaacagaagacagctgctgggtcaggccacccctaggaactcagtcctgtactctggggtgctgcctgaatccattaaaaatgggagtactgatgaaataaaactacatggtcaacagtaaaaaaaaaaaaaaaaaaa

SEQ ID NO: 462 - DNA, 3175 bp, Homo sapiens
  modified_base (3096)..(3121): a, t, c, g, other or unknown
gagctccggcgcgaggcgcggcgcagcgctgctcctagacttcaccccacccagctctggcggccgctgcagccccccaaaagtgccccagcttggggcgaggggtgggaatgcaagatctcgggacctctcgctggcctgcaagctttggtctctacacctaggaaactcctgtgggcaaagtctgcagatccaaaagcgtccaggttaggagacgctcagcctcaagcaactggggtaagagatcccatttggtcaaagccttctcctcaagcagtacttcaccctcctgcactagacgcctccagggagctggagcggagcagggctcggtgggccagctcttagcaacccaggtctaagacccggtgtggagaggaacaaccacagacgcggcggcttagctaggcgctctggaagtgcaggggaggcgcccgcctgccttgcgtgccgcacccatgacctctagtttcagctgtgaacctgggcggaggaataattgaggaactcacggaactatcaactggggacaaacctgcgatcgccacggtccttccgccctctccttcgtccgctccatgcccaagagctgcgctccggagctggggcgaggagagccatggaggaaccgggtgctcagtgcgctccaccgccgcccgcgggctccgagacctgggttcctcaagccaacttatcctctgctccctcccaaaactgcagcgccaaggactacatttaccaggactccatctccctaccctggaaagtactgctggttatgctattggcgctcatcaccttggccaccacgctctccaatgcctttgtgattgccacagtgtaccggacccggaaactgcacaccccggctaactacctgatcgcctctctggcggtcaccgacctgcttgtgtccatcctggtgatgcccatcagcaccatgtacactgtcaccggccgctggacactgggccaggtggtctgtgacttctggctgtcgtcggacatcacttgttgcactgcctccatcctgcacctctgtgtcatcgccctggaccgctactgggccatcacggacgccgtggagtactcagctaaaaggactcccaagagggcggcggtcatgatcgcgctggtgtgggtcttctccatctctatctcgctgccgcccttcttctggcgtcaggctaaggccgaagaggaggtgtcggaatgcgtggtgaacaccgaccacatcctctacacggtctactccacggtgggtgctttctacttccccaccctgctcctcatcgccctctatggccgcatctacgtagaagcccgctcccggattttgaaacagacgcccaacaggaccggcaagcgcttgacccgagcccagctgataaccgactcccccgggtccacgtcctcggtcacctctattaactcgcgggttcccgacgtgcccagcgaatccggatctcctgtgtatgtgaaccaagtcaaagtgcgagtctccgacgccctgctggaaaagaagaaactcatggccgctagggagcgcaaagccaccaagaccctagggatcattttgggagcctttattgtgtgttggctacccttcttcatcatctccctagtgatgcctatctgcaaagatgcctgctggttccacctagccatctttgacttcttcacatggctgggctatctcaactccctcatcaaccccataatctataccatgtccaatgaggactttaaacaagcattccataaactgatacgttttaagtgcacaagttgacttgccgtttgcagtggggtcgcctaagcgacctttggggaccaagttgtgtctggttccacaggtaggtcgaatcttctttcgcggtttctgggtcccagcgaggctctctctcctgggcaagggcaatggatcctgagaagccagaatagtcctgagagagagctctgaaaggagaagtgttgaaactaaatgtagagcttccctgcccaggaggaggctcacttcctcccctcaagccccgggctcagcactgaccctgcggtagccaatcccaaagggggttgcaacttttaaaaattgataatggaagggaatccctgccctgctttggtatcgtggataatgcccactagaagcagtgtacttgtaattgttgtctgaagcctgtctgagacagatctacatacagcctggcagtacttgaactagacgcttaatgccctgtgtttttggggggagaactttgtgttacagcttaatttaagaacagttactttggcatcattcagtcttcactttttgtctatttaaacttggttggagaaacttgtggatttggtgcttcaaaccctatgtgtggcttggatggcgcagagaaaccttgaagagttaacagcaaaattctgatgctgagatctctatttttattatacttgaaactatatgggggtgggtgggtgggaatgggagatgaggagtgttaaactgagaatcaacacctatgattgtttgttttctgcagatttacaattttgtaattcctgtttagcgattgtcaagccacaactctaacaaacaaaccattatgtgtgctagtgccaaagtctgcagactgctttattttttctcttaatttcatgtacctgtcactttacacatttaaatccccataaatgaagggtatgatgggtgactcagcccacactgctgctatatttcttactaatgcaattggtaaaaccgattagtattggaaatatactgtttcttaacaagaaaagtgtctttatttcttatccaatttagtgagatgtgaaggagactgatgacatggggatagttcttacacaattgaggaatggggtgggggcaataggaggatgtatattttgacttgtaaaaaaatcttaaagtgcatgaaacttttatctgatagtcatttgcactctccttcccatctgtgattccttgtgtgctaacatataaagaaaccaagagaactatcttccttctccagaaaccttaaaaatacagttaagggccctaaaaacgatattgaaaagaaaataaacttgtttctnnnnnnnnnnnnnnnnnnnnnnnnnntgggcaggagaaaagattgctagaaaatgacatataagaactttagaaaagctt

SEQ ID NO: 463 - DNA, 1611 bp, Homo sapiens
gctagatgtggtggcacacgtctgtaataccagctgctggtattacagacgtgtgctacatccagctccctgaggactgagtgggcggaggctgaagagttgagaatggagagaatgttacctctcctggctctggggctcttggcggctgggttctgccctgctgtcctctgccaccctaacagcccacttgacgaggagaatctgacccaggagaaccaagaccgagggacacacgtggacctcggattagcctccgccaacgtggacttcgctttcagcctgtacaagcagttagtcctgaaggcccctgataagaatgtcatcttctccccactgagcatctccaccgccttggccttcctgtctctgggggcccataataccaccctgacagagattctcaaaggcctcaagttcaacctcacggagacttctgaggcagaaattcaccagagcttccagcacctcctgcgcaccctcaatcagtccagcgatgagctgcagctgagtatgggaaatgccatgtttgtcaaagagcaactcagtctgctggacaggttcacggaggatgccaagaggctgtatggctccgaggcctttgccactgactttcaggactcagctgcagctaagaagctcatcaacgactacgtgaagaatggaactagggggaaaatcacagatctgatcaaggaccttgactcgcagacaatgatggtcctggtgaattacatcttctttaaagccaaatgggagatgccctttgacccccaagatactcatcagtcaaggttctacttgagcaagaaaaagtgggtaatggtgcccatgatgagtttgcatcacctgactataccttacttccgggacgaggagctgtcctgcaccgtggtggagctgaagtacacaggcaatgccagcgcactcttcatcctccctgatcaagacaagatggaggaagtggaagccatgctgctcccagagaccctgaagcggtggagagactctctggagttcagagagataggtgagctctacctgccaaagttttccatctcgagggactataacctgaacgacatacttctccagctgggcattgaggaagccttcaccagcaaggctgacctgtcagggatcacaggggccaggaacctagcagtctcccaggtggtccataaggctgtgcttgatgtatttgaggagggcacagaagcatctgctgccacagcagtcaaaatcaccctcctttctgcattagtggagacaaggaccattgtgcgtttcaacaggcccttcctgatgatcattgtccctacagacacccagaacatcttcttcatgagcaaagtcaccaatcccaagcaagcctagagcttgccatcaagcagtggggctctcagtaaggaacttggaatgcaagctggatgcctgggtctctgggcacagcctggcccctgtgcaccgagtggccatggcatgtgtggccctgtctgcttatccttggaaggtgacagcgattccctgtgtagctctcacatgcacaggggcccatggactcttcagtctggagggtcctgggcctcctgacagcaataaataatttcg

SEQ ID NO: 464 - DNA, 3750 bp, Homo sapiens
gtgactctgctgaccttcggcatgacattgatcgccgtagaaaagaaagaagtaaagaacggggagattccaagggctccagggaatccagtggatcaagaaagcaggaaaaaactccaaaagattacaaggaatacaaatcttacaaagatgacagtaaacataaaagagagcaagatcattctcgatcttcatcctcttcagcatcaccttcttctcccagttctcgagaagaaaaggagagtaagaaggaaagagaagaagaatttaaaactcaccatgaaatgaaagaatactcaggctttgcaggagttagccgaccacgaggaacctttcatgacgacagagatgatggtgtggattattgggccaaaagaggaagaggtcgtggtacttttcaacgtggcagagggcgctttaacttcaaaaaatcaggtagcagtcctaaatggactcatgacaaataccaaggggatgggattgttgaagatgaagaagagaccatggaaaataatgaagaaaagaaggacagacgcaaggaagaaaaggaataataaatatgaagtaagattacaacagagcagaacttgcacccaccattttttttacctgattttggttttcaaataagaatgtaagcattttacttaaattttactgtttgcaagtagtctatagaaatttggttttaagtcttcaaatatcttgagaaatagtagactgtatgttgaaaattgtactgaaataaagtagaaaattgttacgtaccatatttgtaactatcaacttttaaaacttttaacgtttttgttacatgcattgtaattctgctttgtctataagatatggtcaagtacagctctgtgaaagttctgattctcttccttccctgtttgtcaatgttttattctgaagtaaacgttagctctacatataaatcctggaacagaaattgtttatagagactacactaattattttaactgtatacatctgtttaatttgaacacactacatcgtagggtgactgatttttgaagtataccacagacaaaaagttgttactatggtaaactaagctagtttaacacttgagcaaatgcttaagaaggaattaaaaaaaaaaagctttgccaatagctaaaaagtacaagctattaaaaatcagattgaaaagttttgagaaaatgttatttttactgaaagcaagcagtggcctataaagaacattcttaggagccttttctatttgcgttcaaaactgtgtgttctctttctattcctatttgatagtttgagtcatggtcttagatattagctatttgtgagaggaaactggtttgtaacaatactgcaaatagaaaccccatttctactgaacatcctagttttaaacagaagaaaaactgtaatcctggggttggtatgtaggaggtctatcctgcagaataagttgatacattagtacctgatttcatatcttacatatttatttgagctgaacattagtttgtagtgtaactattagtaaaaatagagaaacacagcatactgttcattaatagtattttaaaaaaattgtttttcaaatgtcaccaataaaagttttggcaggaagcttgttgcggcattgatctaacctttttcccccccatttcagttgcagtttttgtagaatggctttttctttttcctcttaagagttctattcttcaggtagataatttttcaaatgtgaattatcttttgtgtctatattgatagctcttaaaggagtgaaaatctaaaatagtaaatttcaatgttaagtgtctgctttatgggcatatataaaagtagacacatttcatttgttaatttagttgtgtgtgtgtgttaaaaggagctaatgcttattctgttaatgtaaacttttgaagatcttaagtgtattgctctttcatcttaaacactttcgaggatttgcagtgcgtctagcacctagattacagccaggaacattggttaagaactgttggaaacaaaactaaaagcaaactcaacatatgtgatgtttatggccctcagatccttagtattgtgtgattttcccccgttaacatgtctttctaaaattgtctattaaagcagaggaaatacctgccaaaggaagtatgtattgcattaatcagggcataactaatattctcctgttcagaataatacttatttacgtgtgaaagcaacatggatgtgattcccaacacagaattttcatgacccttttattgtatacaaataaataccataacagttacttggttagacatcaaatctgtgtgcatgactatgtgcttatccacttaagacaataggtaaaaggggatctgagaaattatgtaatagggagtgggaataaaactacttaattcctgtgggcaggttatattttaagttcaaatgcattgctttaacctttggttacttttattctgttaaacagaattgaagaaagagtattataccagagtgtagtaggctagggtgattgtaagaactctgtaatagaatgtcattgtggatgttacctttttcagatccaagcatataaaaagcctgtatattttttaaaaacacatcttaactccacgctttacgatattataaaagttgaatggttcctcttggtaaggatatttgcttacaagtgctaggaaataactcactgatacctgcgttaacatactttgttttgcctagagaggggcaataaaaatgaaccaaaggatatttccagaaaggattaagaaagctgtttaagaaggccatgactctttaggtgtgtatgtgtacctttcagcatcctaggaatttttatactaaaagcaaaatgttttttccagttagtcttcttcaaggaattactattgttccttttgtcacaggtaaaatcagtgttgggaattataatttgagaaaaatattacccagtaacattgaatgtagatggctaaacgattcttactcagtgtgatgtataatgatgcaacagggacccttgtaaattgtcatacgccaataaaatgtcacaagtaataactgctgttgtttgtttacctgtgtctatttcacacatcttatttctgtggcctattttagaatatcagcgcatctgttaggaagattactggtgtggtaaggcttgataaatgctttataaactccctcaaacctttctttactgtttttttgttttgtcttgtttttgtttttgtttttgtttttgtttttgtttttcccttgtctcccctgggaaaatgggaaattttacagttggtaaatctaagccaaaattattttgaaataaaggaattctggatgtccagtttagtcctcgttttcttacgttaatctgggaccttatcacccataatatggtgattacttctctttctaaaaacatagtagctagtaaataagtaaaaagaattgtcttttcattcactttaagtaagatgtggtataattcttaccatgtgccatcctgtcagttttaacaaagcattttcacagaaatttgtgtactaagacaaactgacacattttgactcatacaaatggcaaattagtccttaaaaattctgtgagagaaataactctgtgtgtacatacatatgcatgtaaagtgttgtgtaagatcattggtagcttaattatactggataattgtaatgttatatacaaatttcttatataaaagtatgctgcatt

SEQ ID NO: 465 - DNA, 376 bp, Homo sapiens
  modified_base (228): a, t, c, g, other or unknown
  modified_base (237): a, t, c, g, other or unknown
  modified_base (304): a, t, c, g, other or unknown
  modified_base (321): a, t, c, g, other or unknown
  modified_base (372): a, t, c, g, other or unknown
attctttaaaaaattagttgctttttatacagctatacaaagttcttaatgtttctttggcaatggaatataatggaattttacaactatataaaaaagttacctttgcctaagaaacagtatttactgtgtgtacatagttgactgacaaaattctctaccatccagcaccctaattaattgacgaaataagctacctcatattacaggattccccaaaagaaaggnggaaaaagncacacacatacacacacacacacacacacacacacacacacacacacacacacacacaaccttctgngggctcaaaacacagtntcacgggccctttctgcagggcaacttggcaattgccaaatacaatttagnggat

SEQ ID NO: 466 - DNA, 495 bp, Homo sapiens
  modified_base (9): a, t, c, g, other or unknown
  modified_base (11): a, t, c, g, other or unknown
  modified_base (14)..(15): a, t, c, g, other or unknown
  modified_base (24): a, t, c, g, other or unknown
  modified_base (28): a, t, c, g, other or unknown
  modified_base (38): a, t, c, g, other or unknown
  modified_base (49): a, t, c, g, other or unknown
  modified_base (60): a, t, c, g, other or unknown
  modified_base (68): a, t, c, g, other or unknown
  modified_base (89): a, t, c, g, other or unknown
  modified_base (108): a, t, c, g, other or unknown
  modified_base (135): a, t, c, g, other or unknown
  modified_base (258): a, t, c, g, other or unknown
  modified_base (283): a, t, c, g, other or unknown
  modified_base (311): a, t, c, g, other or unknown
  modified_base (319): a, t, c, g, other or unknown
  modified_base (401): a, t, c, g, other or unknown
  modified_base (422): a, t, c, g, other or unknown
  modified_base (437): a, t, c, g, other or unknown
  modified_base (469): a, t, c, g, other or unknown
  modified_base (479): a, t, c, g, other or unknown
cctcatgancnggnntttaatgtnccanaaaaacactnaaagatattcntgtaaatacanataagctntgtgtcaacattcagtactangcaaatcatttttcactangacaaaatgaccaacttacacacttcngggtagcgcttaatacttatctttgaactctattgctgatgctaggccctaaagagcaatgactcaaccagaaaaaatagtaaaggctgcctctttcctttttaaagcgcttattagctttanatccacaaacaatgggtttttacanctacatactactgaaagggtgctcaaancgtcaccncttacaggccttcgaacatgtcattttctaaccctggcacatgtaaacttgttttatccggcattcaatggaggtccgcttncaaatgggctcccaatcatcnggtttcaaatcaggncaggggccaagggtccccgcccggattaaacnggcggcaggnggggccaaacccccgg

SEQ ID NO: 467 - DNA, 352 bp, Homo sapiens
  modified_base (11)..(12): a, t, c, g, other or unknown
  modified_base (14): a, t, c, g, other or unknown
  modified_base (218): a, t, c, g, other or unknown
  modified_base (264): a, t, c, g, other or unknown
  modified_base (296): a, t, c, g, other or unknown
  modified_base (314): a, t, c, g, other or unknown
  modified_base (323): a, t, c, g, other or unknown
  modified_base (330): a, t, c, g, other or unknown
  modified_base (345): a, t, c, g, other or unknown
ggtgaaccagnntntttatcagtttattaatctatttttaatatatagacttttcagtagacaacagcataaaacatattcttttcaagttcaaattgaactttcaccaacatagaccatattctgggccataaaataaacattggcaaatttaaaataattgaaatcatattaagtttgttctctgaccctgatagaggtaagccagaaatcaagancagaaagatatctagaaaaatcccaaataatttggaagtaaaagancacaattttaaataaaccatggggccaaaggnaaaggtcacagggggaanctcttaggnactgganctaaaataggggggnattttac

SEQ ID NO: 468 - DNA, 1709 bp, Homo sapiens
ggcatgcagtttttgtcaggctgcacagaaaagccagtcattgagctctggaagaagcacacgctagcccgagaggatgtctttccggccaatgccctcctggaaatccggccattccaagtttggctccatcacctcgaccacaacgtgagccccaacatcttcgcctgggtctacagggagatcaatgatgacctgtcctaccagatggactgccacgccgtggagtgcgagagcaagctcgaggccaagaaactggcccacgccatgatggaggccttcaggaagactttccacagtatgaagagcgacgggcggatccacagcaacagctcctccgaagaggtttcccaggaattggaatccgatgatggctgaatgaacttgagacgcttcagcaaaggcagcattggtcacggagttcaagggaatagatgagtaagcaacgtttcaaatttgggatgaaaagactgccaaactattggctgaccaaggtttttaaattcagaagagcaattctaaatctaaagaaatgtatcattaaagtaattacgttacattgaaacctgctgctgctgtgactgtgaggagggtgggagtgtggatggggaggaaggttctaggctctcttcttatttttctcatttcccaatgcctctctgtgggagagctccatgccagttttcaccacgctcaggcaaatactctgcagctgttattggatgggccattccgatctgccttatgaaattccacaagaatgttaggggcacctatgggatctctagtggggtgggcagggtgctgatggggacgctggccgcagggaggaaggaacatctcgggagggccctctgttcctctcccacggcagatgccctcctctgtatgcaaatcagcacagcctttattgagctttacaactaacaacctgatagttggcagttaattcacagttacagataatgcttttatttacataaatataccaagtagtaccctcttattgtattcacttcatctattttcttagaatacttgcaattactaatgaccccttccctttccctcctgctgccctgtccaccctctttccccttctaacatccttagagggatgaaatctcagcatatgttgcaggacaccaaaaggaagaaaacaatcaagcaaataaaataaacagtcaaacaaaccaggagtttaaaacaacaaccccaacaacagaagccttggcaaagaggaatgagtgatcagcaagtgaacacactctatgtcaactctccttttatccagctgagatttatggtaacttatttaattaatggtcctgtctgatgcatccttgatggcaagcttcaaatctgatttggtgtcaccgaggaaaccttgcccccatcactcagcattgcacttagatacagaatgagttagataaacttggcttgtctagagacccatgtcatcttaacctaaagggaaatcttattgcgttatcataaaattgatgatatcttagggtcagaattgccctttttttttattttgaatgggaagttctcactaaaacaatcctgagatttcttaatttcatggttctttaaatattataaacacagagtcaacatagaatgaaattgtatttgttaaaatacacacattggaggacaagagcagatgactacttttcgaagtaatgctgctccttcct

SEQ ID NO: 469 - DNA, 1889 bp, Homo sapiens
ggctcgggcaagcgtggggggcccgcgcgtcccgggagccccgaggcggcagcgcgcgtttccacgccgcggtcccgcgggaaagccgggggcggcggcctggctgaggccaagctcggatccggtgccgagccaagcggggccgtgcgtcgccggggcttcgccttcgctcgcgtgacctccgccgtcctccccaaccctcgtcctctggccgcgcctgcggccgcacgcccagcgcccctcgcctaacctcgcgcccgggccgcgcctcctcctcctcctgctccccgccgcttccgtttctcgagggaaaggctgctgcctcctgctctgtcctcatccccggcttagctgacggcccagagggtgggtgccaattccaccagcagctgcaactgaaaagcaaggttcagaaatgtcagatatcctccgggagctgctctgtgtctctgagaaggctgctaacattgcccgggcgtgcagacagcaggaagccctcttccagctgctgatcgaagaaaagaaagagggagaaaagaacaagaagtttgcagttgacttcaagactctggctgatgtactggtacaggaagttataaaacagaatatggagaacaagtttccaggcttggaaaaaaatatttttggagaagaatccaatgagtttactaatgactggggggaaaagattaccttgaggttgtgttcaacagaggaagaaacagcagagcttcttagcaaagtcctcaatggtaacaaggtagcatctgaagcattagccagggttgttcatcaggatgttgcctttactgacccaactctggattccacagagatcaatgttccacaggacattttgggaatttgggtggaccccatagattcaacttatcagtatataaaaggttctgctgacattaaatccaaccagggaatcttcccctgtggacttcagtgtgtcaccattttaattggtgtctatgacatacagacaggggttcccctgatgggagtcatcaatcaaccttttgtgtcacgagatccaaacaccctcaggtggaaaggacagtgctattggggcctttcttacatggggaccaacatgcattcactacagctcaccatctctagaagaaacggcagtgaaacacacactggaaacaccggctctgaggcagcattctcccccagtttttcagccgtaattagtacaagtgaaaaggagactatcaaagctgcattgtcacgtgtgtgtggagatcgcatatttggggcagctggggctggttataagagcctatgtgttgtccaaggcctcgttgacatttacatcttttcagaagataccacattcaaatgggactcttgtgctgctcatgccatactgcgggccatgggtgggggaatagtagacttgaaagaatgcttagaaagaaatccagaaacagggcttgatttgccacagttggtgtaccacgtggaaaatgagggtgctgctggggtggatcggtgggccaacaagggaggactcattgcatacagatccaggaagcggctggagacattcctgagcctcctggtccaaaacctggcacctgcagagacgcatacctagaggaactctaaccccggtgtacctgtataaactgaactgtgaaactgtttcggttatctctgtcttttgaggatggctttgtcctgttgctggttaacattcaccttcctcttttgaggagtatttttccattatgtattcataataatgttaatttcaataaatgacattcatgcagcaattatattggtgtatgaaattcttacagtgaatattgtgctgttagtgctgcttgaaacatttcaataaaatattgaccaggaaaaaaaaaaaa

SEQ ID NO: 470 - DNA, 4397 bp, Homo sapiens
gaattcggcgctgagtgacccgagtcgggacgcgggctgcgcgcgcgggaccccggagcccaaacccggggcaggcgggcagctgtgcccgggcggcacggccagcttcctgatttctcccgattccttccttctccctggagcggccgacaatgtccaccacggtcaatgtagattcccttgcggaatatgagaagagccagatcaagagagccctggagctggggacggtgatgactgtgttcagcttccgcaagtccacccccgagcggagaaccgtccaggtgatcatggagacgcggcaggtggcctggagcaagaccgccgacaagatcgagggcttcttggatatcatggaaataaaagaaatccgcccagggaagaactccaaagatttcgagcgagcaaaagcagttcgccagaaagaagactgctgcttcaccatcctatatggcactcagttcgtcctcagcacgctcagcttggcagctgactctaaagaggatgcagttaactggctctctggcttgaaaatcttacaccaggaagcgatgaatgcgtccacgcccaccattatcgagagttggctgagaaagcagatatattctgtggatcaaaccagaagaaacagcatcagtctccgagagttgaagaccatcttgcccctgatcaactttaaagtgagcagtgccaagttccttaaagataagtttgtggaaataggagcacacaaagatgagctcagctttgaacagttccatctcttctataaaaaacttatgtttgaacagcaaaaatcgattctcgatgaattcaaaaaggattcgtccgtgttcatcctggggaacactgacaggccggatgcctctgctgtttacctgcatgacttccagaggtttctcatacatgaacagcaggagcattgggctcaggatctgaacaaagtccgtgagcggatgacaaagttcattgatgacaccatgcgtgaaactgctgagcctttcttgtttgtggatgagttcctcacgtacctgttttcacgagaaaacagcatctgggatgagaagtatgacgcggtggacatgcaggacatgaacaaccccctgtctcattactggatctcctcgtcacataacacgtaccttacaggtgaccagctgcggagcgagtcgtccccagaagcttacatccgctgcctgcgcatgggctgtcgctgcattgaactggactgctgggacgggcccgatgggaagccggtcatctaccatggctggacgcggactaccaagatcaagtttgatgacgtcgtgcaggccatcaaagaccacgcctttgttacctcgagcttcccagtgatcctgtccatcgaggagcactgcagcgtggagcaacagcgtcacatggccaaggccttcaaggaagtatttggcgacctgctgttgacgaagcccacggaggccagtgctgaccagctgccctcgcccagccagctgcgggagaagatcatcatcaagcataagaagctgggcccccgaggcgatgtggatgtcaacatggaggacaagaaggacgaacacaagcaacagggggagctgtacatgtgggattccattgaccagaaatggactcggcactactgcgccattgctgatgccaagctgtccttcagtgatgacattgaacagactatggaggaggaagtgccccaggatataccccctacagaactacattttggggagaaatggttccacaagaaggtggagaagaggacgagtgccgagaagttgctgcaggaatactgcatggagacggggggcaaggatggcaccttcctggttcgggagagcgagaccttccccaatgactacaccctgtccttctggcggtcaggccgggtccagcactgccggatccgctccaccatggagggcgggaccctgaaatactacttgactgacaacctcaccttcagcagcatctatgccctcatccagcactaccgcgagacgcacctgccgtgcgccgagttcgagctgcggctcacggaccctgtgcccaaccccaacccccacgagtccaagccgtggtactatgacagcctgagccgcggagaggcagaggacatgctgatgaggattccccgggacggggccttcctgatccggaagcgagaggggagcgactcctatgccatcaccttcagggctaggggcaaggtaaagcattgtcgcatcaaccgggacggccggcactttgtgctggggacctccgcctattttgagagtctggtggagctcgtcagttactacgagaagcattcactctaccgaaagatgagactgcgctaccccgtgacccccgagctcctggagcgctacaatatggaaagagatataaactccctctacgacgtcagcagaatgtatgtggatcccagtgaaatcaatccgtccatgcctcagagaaccgtgaaagctctgtatgactacaaagccaagcgaagcgatgagctgagcttctgccgtggtgccctcatccacaatgtctccaaggagcccgggggctggtggaaaggagactatggaaccaggatccagcagtacttcccatccaactacgtcgaggacatctcaactgcagacttcgaggagctagaaaagcagattattgaagacaatcccttagggtctctttgcagaggaatattggacctcaatacctataacgtcgtgaaagcccctcagggaaaaaaccagaagtcctttgtcttcatcctggagcccaagcagcagggcgatcctccggtggagtttgccacagacagggtggaggagctctttgagtggtttcagagcatccgagagatcacctggaagattgacaccaaggagaacaacatgaagtactgggagaagaaccagtccatcgccatcgagctctctgacctggttgtctactgcaaaccaaccagcaaaaccaaggacaacttagaaaatcctgacttccgagaaatccgctcctttgtggagacgaaggctgacagcatcatcagacagaagcccgtcgacctcctgaagtacaatcaaaagggcctgacccgcgtctacccaaagggacaaagagttgactcttcaaactacgaccccttccgcctctggctgtgcggttctcagatggtggcactcaatttccagacggcagataagtacatgcagatgaatcacgcattgttttctctcaatgggcgcacgggctacgttctgcagcctgagagcatgaggacagagaaatatgacccgatgccacccgagtcccagaggaagatcctgatgacgctgacagtcaaggttctcggtgctcgccatctccccaaacttggacgaagtattgcctgtccctttgtagaagtggagatctgtggagccgagtatgacaacaacaagttcaagacgacggttgtgaatgataatggcctcagccctatctgggctccaacacaggagaaggtgacatttgaaatttatgacccaaacctggcatttctgcgctttgtggtttatgaagaagatatgttcagcgatcccaactttcttgctcatgccacttaccccattaaagcagtcaaatcaggattcaggtccgttcctctgaagaatgggtacagcgaggacatagagctggcttccctcctggttttctgtgagatgcggccagtcctggagagcgaagaggaactttactcctcctgtcgccagctgaggaggcggcaagaagaactgaacaaccagctctttctgtatgacacacaccagaacttgcgcaatgccaaccgggatgccctggttaaagagttcagtgttaatgagaaccagctccagctgtaccaggagaaatgcaacaagaggttaagagagaagagagtcagcaacagcaagttttactcatagaagctggggtatgtgtgtaagggtattgtgtgtgtgcgcatgtgtgtttgcatgtaggagaacgtgccctattcacactctgggaagacgctaatctgtgacatcttttcttcaagcctgccatcaaggacatttcttaagacccaactggcatgagttggggtaatttcctattattttcatcttggacaactttcttaacttatattctttatagaggattccccaaaatgtgctcctcatttttggcctctcatgttccaaacctcattgaataaaagcaatgaaaaccttgatcaattaagccttctgttgcacgacctgtgcagtgaacaggatttcttttctggccaagaagattctacctctaatgatccaggtaactgatgtccatggaggatgagctggaaatgtaagaaactattcatgagactctgaaaaaaaaaa

SEQ ID NO: 471 - DNA, 2058 bp, Homo sapiens
  modified_base (275): a, t, c, g, other or unknown
gcagctgcagcgggcgtgagttgggggaggacgggttgccgactcgcctacctagcggtctcttgattgtcgatattttgttggcataggtttatgtagagacgtatacatatatatagacacactgtctttaaatctaggcctgtatccggtgtccgaggcgaactcagtaagatgatgttaagaggaaacctgaagcaagtgcgcattgagaaaaacccggcccgccttcgcgccctggagtccgcggtgggcgagagcgagccggcggccgnggcagccatggcgctcgctcttgccggggagccggcaccgcccgcgcccgcgcctccagaggaccacccggacgaggagatggggttcactatcgacatcaagagtttcctcaagccgggcgagaagacgtacacgcagcgctgccgcctcttcgtgggaaatctgcccaccgacatcacggaggaggacttcaagaggctcttcgaacgctatggcgagcccagcgaagtcttcatcaaccgggaccgtggcttcggcttcatccgcttggaatccagaaccctggctgaaattgcaaaagcagagctggacggcaccattctcaagagcagacctctacggattcgcttcgctacacatggagcagccttgactgtcaagaacctttctccagttgtttccaatgagctgctagagcaagcattttctcagtttggtccagtagagaaagctgttgtggttgtggatgatcgcggtagagctacaggaaaaggttttgtagagtttgcagcaaaacctcctgcacgaaaggctctggaaagatgtggtgatggggcattcttgctaacaacgacccctcgtccagtcattgtggaacccatggagcagtttgatgatgaagatggcttgccagagaagctgatgcagaaaactcaacaatatcataaggaaagagaacaaccaccacgttttgctcaacctgggacatttgaatttgagtatgcatctcgatggaaggctcttgatgaaatggaaaagcagcagcgtgagcaggttgatagaaacatcagagaagccaaagagaaactggaggcagaaatggaagcagctaggcatgaacaccaattaatgctaatgaggcaagatctaatgaggcgtcaagaagaactcagacgcttggaagaactcagaaaccaagagttgcaaaaacggaagcaaatacaactaagacatgaagaggagcatcggcggcgtgaggaagaaatgatccgacacagagaacaggaggaactgaggcgacagcaagagggctttaagccaaactacatggaaaatagagaacaggaaatgagaatgggtgatatgggtccccgtggagcaataaacatgggagatgcgtttagcccagcccctgctggtaaccaaggtcctcctccaatgatgggtatgaatatgaacaacagagcaactatacctggcccaccaatgggtcctggtcctgccatgggaccagaaggagccgcaaatatgggaactccaatgatgccagataatggagcagtgcacaatgacagatttcctcaaggaccaccatctcagatgggttcacctatggggagtagaacaggttctgaaacccctcaagcaccaatgagtggtgtaggtcctgtgagtggtggtcctggtggctttggtagaggaagtcaagggggcaactttgaaggccctaataagcgtcgtagatattaaacattcgttcattcctggctatctagaaaaaaaaaagtcagtggtatgcctttatacttttacctgttatctggaagaaatggttttattgttaatgtatgtagacttaaaagttttttttttttgtaaaacttgaggtttttgtatttttctttattcatgagctttgtagattagaatggtaatgatgctcatcattttgaatgttgaaatgtgtttgtgactttagctaaatataagtattccatagtactgtgaaatctatgtagttaatctcaataaagaaatcattttggataatttaaaaaaaaa

SEQ ID NO: 472 - DNA, 385 bp, Homo sapiens
  modified_base (319): a, t, c, g, other or unknown
  modified_base (355): a, t, c, g, other or unknown
cataagcgaaacatgattttggaattttcaggatggggaaaagaaacaaaataaattatgggagttttttgtgttttttttttgagactggctctcattcctctgtcacatgggctggagtgcagtagtgtaatctcagcttactgcaacctctgcctcaagtgatcctcccacctcagactccagagtagctggggagcacataaaattaaaacatctaaactctcataatgggtcattttgccagggttctgcaggcaaacttttatttgaagtattcttttttgtgctttgtattgaaagtaaagttagggtagcnaagggggactacttcaaccctgaggaacacggccgnggaaaactgcaggcatatggatgtttgtcc

SEQ ID NO: 473 - DNA, 3366 bp, Homo sapiens
ggcaagaggtagcaacagcgagcgtgccggtcgctagtcgcgggtccccgagtgagcacgccagggagcaggagaccaaacgacgggggtcggagtcagagtcgcagtgggagtccccggaccggagcacgagcctgagcgggagagcgccgctcgcacgcccgtcgccacccgcgtacccggcgcagccagagccaccagcgcagcgctgccatggagcccagcagcaagaagctgacgggtcgcctcatgctggccgtgggaggagcagtgcttggctccctgcagtttggctacaacactggagtcatcaatgccccccagaaggtgatcgaggagttctacaaccagacatgggtccaccgctatggggagagcatcctgcccaccacgctcaccacgctctggtccctctcagtggccatcttttctgttgggggcatgattggctccttctctgtgggccttttcgttaaccgctttggccggcggaattcaatgctgatgatgaacctgctggccttcgtgtccgccgtgctcatgggcttctcgaaactgggcaagtcctttgagatgctgatcctgggccgcttcatcatcggtgtgtactgtggcctgaccacaggcttcgtgcccatgtatgtgggtgaagtgtcacccacagcccttcgtggggccctgggcaccctgcaccagctgggcatcgtcgtcggcatcctcatcgcccaggtgttcggcctggactccatcatgggcaacaaggacctgtggcccctgctgctgagcatcatcttcatcccggccctgctgcagtgcatcgtgctgcccttctgccccgagagtccccgcttcctgctcatcaaccgcaacgaggagaaccgggccaagagtgtgctaaagaagctgcgcgggacagctgacgtgacccatgacctgcaggagatgaaggaagagagtcggcagatgatgcgggagaagaaggtcaccatcctggagctgttccgctcccccgcctaccgccagcccatcctcatcgctgtggtgctgcagctgtcccagcagctgtctggcatcaacgctgtcttctattactccacgagcatcttcgagaaggcgggggtgcagcagcctgtgtatgccaccattggctccggtatcgtcaacacggccttcactgtcgtgtcgctgtttgtggtggagcgagcaggccggcggaccctgcacctcataggcctcgctggcatggcgggttgtgccatactcatgaccatcgcgctagcactgctggagcagctaccctggatgtcctatctgagcatcgtggccatctttggctttgtggccttctttgaagtgggtcctggccccatcccatggttcatcgtggctgaactcttcagccagggtccacgtccagctgccattgccgttgcaggcttctccaactggacctcaaatttcattgtgggcatgtgcttccagtatgtggagcaactgtgtggtccctacgtcttcatcatcttcactgtgctcctggttctgttcttcatcttcacctacttcaaagttcctgagactaaaggccggaccttcgatgagatcgcttccggcttccggcaggggggagccagccaaagtgacaagacacccgaggagctgttccatcccctgggggctgattcccaagtgtgagtcgccccagatcaccagcccggcctgctcccagcagccctaaggatctctcaggagcacaggcagctggatgagacttccaaacctgacagatgtcagccgagccgggcctggggctcctttctccagccagcaatgatgtccagaagaatattcaggacttaacggctccaggattttaacaaaagcaagactgttgctcaaatctattcagacaagcaacaggttttataatttttttattactgattttgttatttttatatcagcctgagtctcctgtgcccacatcccaggcttcaccctgaatggttccatgcctgagggtggagactaagccctgtcgagacacttgccttcttcacccagctaatctgtagggctggacctatgtcctaaggacacactaatcgaactatgaactacaaagcttctatcccaggaggtggctatggccacccgttctgctggcctggatctccccactctaggggtcaggctccattaggatttgccccttcccatctcttcctacccaaccactcaaattaatctttctttacctgagaccagttgggagcactggagtgcagggaggagaggggaagggccagtctgggctgccgggttctagtctcctttgcactgagggccacactattaccatgagaagagggcctgtgggagcctgcaaactcactgctcaagaagacatggagactcctgccctgttgtgtatagatgcaagatatttatatatatttttggttgtcaatattaaatacagacactaagttatagtatatctggacaagccaacttgtaaatacaccacctcactcctgttacttacctaaacagatataaatggctggtttttagaaacatggttttgaaatgcttgtggattgagggtaggaggtttggatgggagtgagacagaagtaagtggggttgcaaccactgcaacggcttagacttcgactcaggatccagtcccttacacgtacctctcatcagtgtcctcttgctcaaaaatctgtttgatccctgttacccagagaatatatacattctttatcttgacattcaaggcatttctatcacatatttgatagttggtgttcaaaaaaacactagttttgtgccagccgtgatgctcaggcttgaaatcgcattattttgaatgtgaagtaaatactgtacctttatttgacaggctcaaagaggttatgtgcctgaagtcgcacagtgaataagctaaaacacctgcttttaacaatgggtaccatacaaccactactccattaactccacccacctcctgcacccctccccacacacacaaaatgaaccacgttctttgtatgggcccaatgagctgtcaaagctgccctgtgttcatttcatttggaattgccccctctggttcctctgtatactactgcttcatctctaaagacagctcatcctcctccttcacccctgaatttccagagcacttcatctgctccttcatcacaagtccagttttctgccactagtctgaatttcatgagaagatgccgatttggttcctgtgggtcctcagcactattcagtacagtgcttgatgcacagcaggcactcagaaaatactggaaaaaatacccccaccaaagatatttgtcaaaa

SEQ ID NO: 474 - DNA, 2519 bp, Homo sapiens
caggaggccctgaccagagaaggacctggaaggacttcagatgtgagcaggatctcttggactgtcgtgtgaaaattaggctgcaggggtcgacaggagcctggactttgaatttaattttgtcccctgccactttgcttctagactatcattattggacctctgaattcttgtctgccttcttgtaggagccccatggcacctgcccagccccacctcagcccatcttgacaaaatctaaggctccatggagccaccacggggcccccctgccaatggggccgagccatcccgggcagtgggcaccgtcaaagtatacctgcccaacaagcaacgcacggtggtgactgtccgggatggcatgagtgtctacgactctctagacaaggccctgaaggtgcggggtctaaatcaggactgctgtgtggtctaccgactcatcaagggacgaaagacggtcactgcctgggacacagccattgctcccctggatggcgaggagctcattgtcgaggtccttgaagatgtcccgctgaccatgcacaattttgtacggaagaccttcttcagcctggcgttctgtgacttctgccttaagtttctgttccatggcttccgttgccaaacctgtggctacaagttccaccagcattgttcctccaaggtccccacagtctgtgttgacatgagtaccaaccgccaacagttctaccacagtgtccaggatttgtccggaggctccagacagcatgaggctccctcgaaccgccccctgaatgagttgctaaccccccagggtcccagcccccgcacccagcactgtgacccggagcacttccccttccctgccccagccaatgcccccctacagcgcatccgctccacgtccactcccaacgtccatatggtcagcaccacggcccccatggactccaacctcatccagctcactggccagagtttcagcactgatgctgccggtagtagaggaggtagtgatggaaccccccgggggagccccagcccagccagcgtgtcctcggggaggaagtccccacattccaagtcaccagcagagcagcgcgagcggaagtccttggccgatgacaagaagaaagtgaagaacctggggtaccgggactcaggctattactgggaggtaccacccagtgaggtgcagctgctgaagaggatcgggacgggctcgtttggcaccgtgtttcgagggcggtggcatggcgatgtggccgtgaaggtgctcaaggtgtcccagcccacagctgagcaggcccaggctttcaagaatgagatgcaggtgctcaggaagacgcgacatgtcaacatcttgctgtttatgggcttcatgacccggccgggatttgccatcatcacacagtggtgtgagggctccagcctctaccatcacctgcatgtggccgacacacgcttcgacatggtccagctcatcgacgtggcccggcagactgcccagggcatggactacctccatgccaagaacatcatccaccgagatctcaagtctaacaacatcttcctacatgaggggctcacggtgaagatcggtgactttggcttggccacagtgaagactcgatggagcggggcccagcccttggagcagccctcaggatctgtgctgtggatggcagctgaggtgatccgtatgcaggacccgaacccctacagcttccagtcagacgtctatgcctacggggttgtgctctacgagcttatgactggctcactgccttacagccacattggctgccgtgaccagattatctttatggtgggccgtggctatctgtccccggacctcagcaaaatctccagcaactgccccaaggccatgcggcgcctgctgtctgactgcctcaagttccagcgggaggagcggcccctcttcccccagatcctggccacaattgagctgctgcaacggtcactccccaagattgagcggagtgcctcggaaccctccttgcaccgcacccaggccgatgagttgcctgcctgcctactcagcgcagcccgccttgtgccttaggccccgcccaagccaccagggagccaatctcagccctccacgccaaggagccttgcccaccagccaatcaatgttcgtctctgccctgatgctgcctcaggatcccccattccccaccctgggagatgagggggtccccatgtgcttttccagttcttctggaattgggggacccccgccaaagactgagccccctgtctcctccatcatttggtttcctcttggctttggggatacttctaaattttgggagctcctccatctccaatggctgggatttgtggcagggattccactcagaacctctctggaatttgtgcctgatgtgccttccactggattttggggttcccagcaccccatgtggattttggggggtcccttttgtgtctcccccgccattcaaggactcctctctttcttcaccaagaagcacagaattctgctgggc

SEQ ID NO: 475 - DNA, 1345 bp, Homo sapiens
atcctgactttagttgctggccgcctttgctttccatccgctatagtggcctcctttgtccttgcgggggaaaccgaggccacagccttgcagcgcaggcctgaatcgcccggatttcccgccccctgctcgtgcgggcctcactgtctccttctgggctgggggcttgcgacaccgccctccggccgactcgctcgtggggtgctggtggcagtggctgggtcactcgtgctctggtcaggagagcgggtctccggcagcctccgggcctcgtagaccgggtacccgggagggtgagggttagtgctgtcgcctccgccgtgctgactcagtcatagggcccagcaacgcagcgcgaccttgggttgggaggacaaagtgtcttcccgggcgcactgaccgggcgggggtctcagctttcagtcatggcctccggtaacgcgcgcatcggaaagccagcccctgacttcaaggccacagcggtggttgatggcgccttcaaagaggtgaagctgtcggactacaaagggaagtacgtggtcctctttttctaccctctggacttcacttttgtgtgccccaccgagatcatcgcgttcagcaaccgtgcagaggacttccgcaagctgggctgtgaagtgctgggcgtctcggtggactctcagttcacccacctggcttggatcaacaccccccggaaagagggaggcttgggccccctgaacatccccctgcttgctgacgtgaccagacgcttgtctgaggattacggcgtgctgaaaacagatgagggcattgcctacaggggcctctttatcatcgatggcaagggtgtccttcgccagatcactgttaatgatttgcctgtgggacgctccgtggatgaggctctgcggctggtccaggccttccagtacacagacgagcatggggaagtttgtcccgctggctggaagcctggcagtgacacgattaagcccaacgtggatgacagcaaggaatatttctccaaacacaattaggctggctaacggatagtgagcttgtgcccctgcctaggtgcctgtgctgggtgtccacctgtgcccccacctgggtgccctatgctgacccaggaaaggccagacctgcccctccaaactccacagtatgggaccctggagggctaggccaaggccttctcatgcctccacctagaagctgaatagtgacgccctcccccaagcccacccagccgcacacaggcctagaggtaaccaataaagtattagggaaaggtgagagtctgtgttggtgtgctctgtactttcgtgctcccctgcaacccccttccttcttcaggctc

SEQ ID NO: 476 - DNA, 77 bp, Homo sapiens
  modified_base (6): a, t, c, g, other or unknown
ggattnaatttcccaaacactgacattttagacaattttgcaaggactctgaatttttgcagggctatttttggata

SEQ ID NO: 477 - DNA, 348 bp, Homo sapiens
  modified_base (30): a, t, c, g, other or unknown
  modified_base (108): a, t, c, g, other or unknown
  modified_base (120): a, t, c, g, other or unknown
  modified_base (124): a, t, c, g, other or unknown
  modified_base (131): a, t, c, g, other or unknown
  modified_base (137): a, t, c, g, other or unknown
  modified_base (152): a, t, c, g, other or unknown
  modified_base (156): a, t, c, g, other or unknown
  modified_base (161): a, t, c, g, other or unknown
  modified_base (170): a, t, c, g, other or unknown
  modified_base (198): a, t, c, g, other or unknown
  modified_base (212): a, t, c, g, other or unknown
  modified_base (219): a, t, c, g, other or unknown
  modified_base (252): a, t, c, g, other or unknown
  modified_base (255): a, t, c, g, other or unknown
  modified_base (265): a, t, c, g, other or unknown
  modified_base (285): a, t, c, g, other or unknown
ttatccaataatatatttaataggtaaganctcattcatcaatatacaaaaaaaaaaaaaacaaaccagaaaacaaaaaactaactttgattaggacatgtgcccttngtaggggccttnacanttggaanggtttntcggtggcactttgnggtngcatnttttgtaangtcacagggctgctctgcgttttctccngggttacaagggtngaggccntcagcctttgccccgggaagagggaaagtgaanttntctgtactcnttgccagtgtcagcctggancacactttctaccacccacccttgggccatccctcctctacactttatgcgtcggggggttta

SEQ ID NO: 478 - DNA, 3088 bp, Homo sapiens
  modified_base (2647)..(2962): a, t, c, g, other or unknown
  modified_base (3074): a, t, c, g, other or unknown
caggcatgagccactgcacccagcctatcgtctgttgttaaatgttctaatgcacctattaggtgcacagagtactgttatatactcagaataaaatttacataatgctttaaatctcacaaaattgttttgataaacatactcttataattcttgcaacaccttgggaaatagttggttctatattactgttttatagctgaggagaaagactcacatcatttactaagatcatatagctagctagtaaatgtttgagtgaaaatacaaacaaaggttttctgactttaagagcttgagttttttccactataccatattgcatctgttgtaattgttaactaatgtgcattttaaaattctcatttgtcttatgtactgagcccttataccagtgctaatttatgtgactcctttctcctgcagctaagagaaaaatacctttttaattcatttatagtacccagtttttaaagaagatttattttgtaaaattttgcttatggtacatgtcatcttagcctgtaaataaattaaagcattaatttttatccctccctggtcttttcctccttctgactttatacgtctttctagagagcttatcttctataataacaattctttgttttaaagtgagaaagatcagtctaaagaaaaggagaagaaagtgaaaaaaacaattccttcctgggctaccctttctgccagccagctagccagggcccagaaacaaacaccgatggcttcttccccacgtcccaagatggatgcaatcttaactgaggccattaaggcatgcttccagaagagtggtgcatcagtggttgctattcgaaaatacatcatccataagtatccttctctggagctggagagaaggggttatctccttaaacaagcactgaaaagagaattaaatagaggagtcatcaaacaggttaaaggaaaaggtgcttctggaagttttgttgtggttcagaaatcaagaaaaacacctcagaaatccagaaacagaaagaataggagctctgcagtggatccagaaccacaagtaaaattggaggatgtcctcccactggcctttactcgcctttgtgaacctaaagaagcttcctacagtctcatcaggaaatatgtgtctcagtattatcctaagcttagagtggacatcaggcctcagctgttgaagaacgctctgcagagagcagtagagaggggccagttagaacagataactggcaaaggtgcttcggggacattccagctgaagaaatcaggggagaaacccctgcttggtggaagcctgatggaatatgcaatcttgtctgccattgctgccatgaatgagccgaagacctgctctaccactgctctgaagaagtatgtcctagagaatcacccaggaaccaattctaactatcaaatgcatttgctgaaaaaaaccctgcagaaatgcgaaaagaatgggtggatggaacagatctctgggaaagggttcagtggcaccttccagctctgttttccctattatcccagcccaggagttctgtttccgaagaaagagccagatgattctagagatgaggatgaagatgaagatgagtcatcagaagaagactctgaggatgaagagccgccacctaagagaaggttgcagaagaaaaccccagccaagtccccagggaaggccgcatctgtgaagcagagagggtccaaacctgcacctaaagtctcagctgcccagcgggggaaagctaggcccttgcctaagaaagcacctcctaaggccaaaacgcctgccaagaagaccagaccctcatccacagtcatcaagaaacctagtggtggctcctcaaagaagcctgcaaccagtgcaagaaaggaagtaaaattgccgggcaagggcaaatccaccatgaagaagtctttcagagtgaaaaagtaaattttataggaaaaaagggtatcatgatgaaattcaaaatcttattttctaaggtcagtgtgcatttgtttagttttgatgcttttcaaattacattattttcctcccctatgaacattgtggggagggactctaaataaaccagtttaggcatttgctagctttaggtgcttttattggtgcctgcccttttccttgttcattttaatttctgcaataatcctggactttcctaaactatgtaatgtatacttgtcctttttctctgcctcccccaaccccctgttgtttttatggtcagctttgccttttttttttcttccaattttatctaaacagttgcagagatttttatatttgtagaaagcatcaagaacggtatgccagtcaggtcctggaagtaaaatggaggcacaatatagcactgactgagttgtaaagcctcctgcctggagacttcagttatagctgtaataattaatcttatttataaaagccactccactaaccttttctctccaactgtaaacacagagacagctttgggaataagccaaaaacagggtgatctcattagattttgaagatatatgactcctttgggctacatttcatattgatcaatttctaggtatttttcactggcccaaagtattgcattcccttaacagcaagcacaagttctctatatcacttgtnnnnnnnnnnnnnnnnnnnnnnnnnnnnnnnnnnnnnnnnnnnnnnnnnnnnnnnnnnnnnnnnnnnnnnnnnnnnnnnnnnnnnnnnnnnnnnnnnnnnnnnnnnnnnnnnnnnnnnnnnnnnnnnnnnnnnnnnnnnnnnnnnnnnnnnnnnnnnnnnnnnnnnnnnnnnnnnnnnnnnnnnnnnnnnnnnnnnnnnnnnnnnnnnnnnnnnnnnnnnnnnnnnnnnnnnnnnnnnnnnnnnnnnnnnnnnnnnnnnnnnnnnnnnnnnnnnnnnnnnnnnnnnnnnnnnnnnnnnnnnnnnnnnnnnnnnnnncccacttggtttttgactgaaggggaagtgtagaaatatattgatttgtgatttctggtgtcacctgtgttaccaaaaatcaaaacaaatcttttttatttttattattatnattattttgagaca

SEQ ID NO: 479 - DNA, 1518 bp, Homo sapiens
tgacaggggggcgcgttattagggctgaggatgggaggatgctcagggtattggggtcagggtggcattagcccagctcaagccgggccgggctgactcagcatcctgccccagccagcttccatccctgacacctctgcactcccttgggcagagatgggagatggcgccggtgttgcccctggtgctgcccctgcagccccgcatccgcctggcacaagggctctggctcctctcctggctgctggcgctggctggtggcgtcatcctcctctgtagtgggcacctcctggtccagctaaggcaccttggcaccttcctggctccctcctgtcagttccctgtcctgccccaggctgccctggcagcgggcgcggtggctctgggcacaggactagtgggtgtaggagccagccgggcaagtctgaatgcagctctataccctccctggcgaggggtcctgggcccgctgctggtggctggcacggctggtgggggggggctcctggtcgtcgccctcgggctagccctggctttgcctgggagtctggatgaggcgctggaggagggcctggtgactgccttggctcactacaaggacacagaggtgcctgggcactgtcaggccaaaaggctggtggatgagctgcaactgaggtaccactgctgcgggcgccacgggtacaaggattggtttggggtccagtgggtcagcagccgttacctggatcccggtgaccgggatgtggctgaccggatccagagcaatgtagaaggcctatacctgactgatggggtccctttctcctgttgcaacccccactcaccccggccttgcctgcaaaaccgtctttcagactcctacgcccaccccctgttcgatccccgacaacccaaccaaaacctctgggcccaagggtgccatgaggtgctgctggagcacttgcaggacttggcaggcacactgggtagcatgctggctgtcaccttcctactgcaggctctggtgctccttggcctgcggtacctgcaaacagcactggaggggcttggaggggtcattgatgcgggaggagagacccagggctatctctttcccagtgggctgaaagatatgctgaaaacagcatggctacagggaggggttgcctgcaggccagcacctgaggaggccccaccaggagaagcacctcccaaggaggatctatctgaggcctagaggcctggagcttggggtgaggaagagggagggatggacaagtctgaaaacctcacaactccttaccaaggctccaggttggggggatcgtaggattagaggggctaaggatagtcagcgagctggactggggtaagaaagaaaaccagatgtcctagggcctagcccttgtagtcagaaccaccagggaacagcaaagaacagagtgatgggaaagtgacatgagaaggcctggaggctgattctgatatagactcaataaagtttttggatggaaaaaaaaaaaaaaagcggccgcc

SEQ ID NO: 480 - DNA, 282 bp, Homo sapiens
  modified_base (231): a, t, c, g, other or unknown
  modified_base (260): a, t, c, g, other or unknown
  modified_base (280): a, t, c, g, other or unknown
gctccccagtggtcagcggagaccccaaggaggatcacaactacagcagtgccaagtcctccaacgcccggagcacctcgcccaccagcgactccatctcctcctcctcctcctcagccgacgaccactatgagtttgccaccaaggggagccaggagggcagcgagggcagcgaggggagcttccggagccacgagagccccagcgacacggaagaggacgacaggaagnacagccagaaggagcccaaggattttttnggggacagcgggtacgattncc

SEQ ID NO: 481 - DNA, 2420 bp, Homo sapiens
  modified_base (906)..(1002): a, t, c, g, other or unknown
atcctgcccggcctgtacatcggcaacttcaaagatgccagagacgcggaacaattgagcaagaacaaggtgacacatattctgtctgtccacgatagtgccaggcctatgttggaggacaagacatttcaaagaaagtattaaattcattcacgagtgccggctccgcggtgagagctgccttgtacactgcctggccggggtctccaggagcgtgacactggtgatcgcatacatcatgaccgtcactgactttggctgggaggatgccctgcacaccgtgcgtgctgggagatcctgtaccaaccccaacgtgggcttccagagacagctccaggagtttgagaagcatgaggtccatcagtatcggcagtggctgaaggaagaatatggagagagccctttgcaggatgcagaagaagccaaaaacattctgggtaaatataaggagcaagggcgcacagagccccagcccggcgccaggcggtggagcagttttccggcactggctccgctgacctacgataattatacgacggagacctaacgcaagcgacctgctgccttccttcccactgcttgtcttcagtgtgcccggctgggcaggggtgcggtggtggtggccgatgaggacaggaaagggagatagccagggcgaggtggggcgagggctcctttcccccaagcaacaccgcccagccctgctccaggcccctgcactcagcccacccctaccctggctgcacctgagcttgctgcccccggggatgttgcccagtggctgtgcactgctctgtgcacgtgcgtgtgtgtgagtgcacttgtgtgtgggtgactaagtggatgcatgtgtgtgcctgtgtgagtgagggtatgtgcacctaagtgtgtacatgtgtgtatgtnnnnnnnnnnnnnnnnnnnnnnnnnnnnnnnnnnnnnnnnnnnnnnnnnnnnnnnnnnnnnnnnnnnnnnnnnnnnnnnnnnnnnnnnnnnnnnnnnccacctttccctttgtccaagactccacatggaaggcatttgagctcgacctccgaaaagctacccagcaaagagcagtctgtgcctctgagcagaccgtgagaactcaggggacgagtggctaagagcatggcctctcccagaacccacccagggtggtgtggtgggggcaacaggggccagactcctctagagggagggtggctctggggccctggaaaacgtgagagactgccctgagctggtccagtgggccagcactttataccaactcagcatttaagggaagtatcttagattgcctccatctcaatgtgaatgcaccaggctgagggttccctagcgccttgagtcaaggccacttttcagcccatcgagccctgagttctacttggtgtttgttctctggagctgattgcacttgagctctgtggtgggcaggcgcactttagcctaagttgggtgccccagggcaccccctcctctctgctccttgccagcttcattcactcccagcctctcgctgtcctcactttgcaggggctcctcctcaacatttgcatgcacctgcaagaattgggaagaaagagcatttattaggcactgtagcaatttgcattttaaaatgcctgagcatttattaagcttcttggtattcacttgggtttgataattgatctgagctacctcattgaatgtttttggaaaggtgttttttggtatgcaagtcagctttgcctcacagttgaaaatgttcggtcatgattgcttttgaaaccaaaggggaaggtaccgatatcattgagctatttaaagttgccagtttgggctccagtaatgctttctggtgggtaaaattccacattcaggccacgagagcatctacagtttgtactctggggctgcaggcatcctgggacgctgtacgcaattcagtggtctagtcctttataccgactcagattccttaagcatgcagagtcactcgaatgaaaaaacatactcgacctctccctaaaaagatgttgcaacccagtttctctgaattccaccacaaaaagagaccctgaataagaagagcagttttcctatgcatatagagggtgtgtcaaaggtgagctttttggggaccgggaaaaacaaagttgcctgattccgcgcaggtgcacaggccccggatgtacacccggaaaggggagtgtggctgtagaatcatccatccgtctacagctaaaacaatttgccaataaagtacatgtttttcctaagccaaaaataaatataaatacgttaacagaaaaatgatttaggatatagcttgaatgcttaaatatgtgcacctttacaaacctctcagtgtattcttggagttcttgaaatgttgttttaatatttgttgccagtaatgttctttcttc

SEQ ID NO: 482 - DNA, 288 bp, Homo sapiens
  modified_base (226): a, t, c, g, other or unknown
  modified_base (279): a, t, c, g, other or unknown
cctgcttcagcctcccaagtagctgggattacaggcgcccaccaccgcacccggctaatttttgtatttttagtagggacgggatttctccgtgttggccaggctttttgaactcctgaccttaggtgatctgcctgccttggcctcccaaagtgctgggattacaggtatgagccactgtgcccatcctcatgtcaatttttaaagtgataaatcctgatattanacattgcaattagtgtagaataaacgcttggcttatagaactctctgttcttnagtctaaag

SEQ ID NO: 483 - DNA, 2204 bp, Homo sapiens
gcagccagctctgagcgggaggcctgagcgggaagcattgggcgtccgagcgacttctaggagcctggggttcggcgctatggaggagctcgatggcgagccaacagtcactttgattccaggcgtgaattccaagaagaaccaaatgtattttgactggggtccaggggagatgctggtatgtgaaacctccttcaacaaaaaagaaaaatcagagatggtgccaagttgcccctttatctatatcatccgtaaggatgtagatgtttactctcaaatcttgagaaaactcttcaatgaatcccatggaatctttctgggcctccagagaattgacgaagagttgactggaaaatccagaaaatctcaattggttcgagtgagtaaaaactaccgatcagtcatcagagcatgtatggaggaaatgcaccaggttgcaattgctgctaaagatccagccaatggccgccagttcagcagccaggtctccattttgtcagcaatggagctcatctggaacctgtgtgagattctttttattgaagtggccccagctggccctctcctcctccatctccttgactgggtccggctccatgtgtgcgaggtggacagtttgtcggcagatgttctgggcagtgagaatccaagcaaacatgacagcttctggaacttggtgaccatcttggtgctgcagggccggctggatgaggcccgacagatgctctccaaggaagccgatgccagccccgcctctgcaggcatatgccgaatcatgggggacctgatgaggacaatgcccattcttagtcctgggaacacccagacactgacagagctggagctgaagtggcagcactggcacgaggaatgtgagcggtacctccaggacagcacattcgccaccagccctcacctggagtctctcttgaagattatgctgggagacgaagctgccttgttagagcagaaggaacttctgagtaattggtatcatttcctagtgactcggctcttgtactccaatcccacagtaaaacccattgatctgcactactatgcccagtccagcctggacctgtttctgggaggtgagagcagcccagaacccctggacaacatcttgttggcagcctttgagtttgacatccatcaagtaatcaaagagtgcagcatcgccctgagcaactggtggtttgtggcccacctgacagacctgctggaccactgcaagctcctccagtcacacaacctctatttcggttccaacatgagagagttcctcctgctggagtacgcctcgggactgtttgctcatcccagcctgtggcagctgggggtcgattactttgattactgccccgagctgggccgagtctccctggagctgcacattgagcggatacctctgaacaccgagcagaaagccctgaaggtgctgcggatctgtgagcagcggcagatgactgaacaagttcgcagcatttgtaagatcttagccatgaaagccgtccgcaacaatcgcctgggttctgccctctcttggagcatccgtgctaaggatgccgcctttgccacgctcgtgtcagacaggttcctcagggattactgtgagcgaggctgcttttctgatttggatctcattgacaacctggggccagccatgatgctcagtgaccgactgacattcctgggaaagtatcgcgagttccaccgtatgtacggggagaagcgttttgccgacgcagcttctctccttctgtccttgatgacgtctcggattgcccctcggtctttctggatgactctgctgacagatgccttgccccttttggaacagaaacaggtgattttctcagcagaacagacttatgagttgatgcggtgtctggaggacttgacgtcaagaagacctgtgcatggagaatctgataccgagcagctccaggatgatgacatagagaccaccaaggtggaaatgctgagactttctctggcacgaaatcttgctcgggcaattataagagaaggctcactggaaggttcctgagaactgcttcaatgtggtatctttgtatggcaatgtatatagatttttttaaaagaataaatgttgtttgcaaatgtaggttcttagaagtccacccagggaattttttatctgtctagtctgaacctgaaggtggtaagagattaaaaaatgc

SEQ ID NO: 484 - DNA, 384 bp, Homo sapiens
  modified_base (1): a, t, c, g, other or unknown
  modified_base (9): a, t, c, g, other or unknown
  modified_base (15): a, t, c, g, other or unknown
  modified_base (29): a, t, c, g, other or unknown
  modified_base (31): a, t, c, g, other or unknown
  modified_base (38): a, t, c, g, other or unknown
  modified_base (57): a, t, c, g, other or unknown
  modified_base (64): a, t, c, g, other or unknown
  modified_base (67): a, t, c, g, other or unknown
  modified_base (74): a, t, c, g, other or unknown
  modified_base (164): a, t, c, g, other or unknown
  modified_base (184): a, t, c, g, other or unknown
  modified_base (295): a, t, c, g, other or unknown
ntcctcatnctcctnaccctcctccttcncnttccttntcctcctcctcctccagcngcccagntcnccccgcnacccgtcagactcctccttcgaccgctcccggcgcggggccttccaggcgacaaggaccgagtaccctccggccggagccacgcagccgngcttccggagccctcggggngctggactggctcgcggtgcagattcttcttaatcctttggtgaaaactgagacacaaaatggctgcaaataagcccaagggtcagaattctttggcttttacacaaagtncatcatggtgggcagtggtggcgtgggcaagtcagctctgaattctaacagtttcatgttacggatgaagtttgttgtaggactatgta

SEQ ID NO: 485 - DNA, 3867 bp, Homo sapiens
acaggcccgcgacgctcccctcagctggcggcggccgcggagagatgccgcgggggccgctcgcagccgccgctgacttgtgaatgggaccgggactggggccgggactgacaccgcagcgcttgccctgcgccagggactggcggctcggaggttgcgtccaccctcaagggccccagaaatcactgtgttttcagctcagcggccctgtgacattccttcgtgttgtcatttgttgagtgaccaatcagatgggtggagtgtgttacagaaattggcagcaagtatccaatgggtgaagaagaagctaactggggacgtgggcagccctgacgtgatgagctcaaccagcagagacattccatcccaagagaggtctgcgtgacgcgtccgggaggccaccctcagcaagaccaccgtacagttggtggaaggggtgacagctgcattctcctgtgcctaccacgtaaccaaaaatgaaggagaactactgtttacaagccgccctggtgtgcctgggcatgctgtgccacagccatgcctttgccccagagcggcgggggcacctgcggccctccttccatgggcaccatgagaagggcaaggaggggcaggtgctacagcgctccaagcgtggctgggtctggaaccagttcttcgtgatagaggagtacaccgggcctgaccccgtgcttgtgggcaggcttcattcagatattgactctggtgatgggaacattaaatacattctctcaggggaaggagctggaaccatttttgtgattgatgacaaatcagggaacattcatgccaccaagacgttggatcgagaagagagagcccagtacacgttgatggctcaggcggtggacagggacaccaatcggccactggagccaccgtcggaattcattgtcaaggtccaggacattaatgacaaccctccggagttcctgcacgagacctatcatgccaacgtgcctgagaggtccaatgtgggaacgtcagtaatccaggtgacagcttcagatgcagatgaccccacttatggaaatagcgccaagttagtgtacagtatcctcgaaggacaaccctatttttcggtggaagcacagacaggtatcatcagaacagccctacccaacatggacagggaggccaaggaggagtaccacgtggtgatccaggccaaggacatgggtggacatatgggcggactctcagggacaaccaaagtgacgatcacactgaccgatgtcaatgacaacccaccaaagtttccgcagagcgtataccagatatctgtgtcagaagcagccgtccctggggaggaagtaggaagagtgaaagctaaagatccagacattggagaaaatggcttagtcacatacaatattgttgatggagatggtatggaatcgtttgaaatcacaacggactatgaaacacaggagggggtgataaagctgaaaaagcctgtagattttgaaaccaaaagagcctatagcttgaaggtagaggcagccaacgtgcacatcgacccgaagtttatcagcaatggccctttcaaggacactgtgaccgtcaagatcgcagtagaagatgctgatgagccccctatgttcttggccccaagttacatccacgaagtccaagaaaatgcagctgctggcaccgtggttgggagagtgcatgccaaagaccctgatgctgccaacagcccgataaggtattccatcgatcgtcacactgacctcgacagatttttcactattaatccagaggatggttttattaaaactacaaaacctctggatagagaggaaacagcctggctcaacatcactgtctttgcagcagaaatccacaatcggcatcaggaagccaaagtcccagtggccattagggtccttgatgtcaacgataatgctcccaagtttgctgccccttatgaaggtttcatctgtgagagtgatcagaccaagccactttccaaccagccaattgttacaattagtgcagatgacaaggatgacacggccaatggaccaagatttatcttcagcctaccccctgaaatcattcacaatccaaatttcacagtcagagacaaccgagataacacagcaggcgtgtacgcccggcgtggagggttcagtcggcagaagcaggacttgtaccttctgcccatagtgatcagcgatggcggcatcccgcccatgagtagcaccaacaccctcaccatcaaagtctgcgggtgcgacgtgaacggggcactgctctcctgcaacgcagaggcctacattctgaacgccggcctgagcacaggcgccctgatcgccatcctcgcctgcatcgtcattctcctgggttgcccaagcttaatggaacccccctctcccagggaagacatgagattgctttatctgggcttccagctgatgctattttcctatgttaaagtaaacagaagattttgtcttctgggggtctttataaaacttcctttcctctatgtggtggctacagagagtccaaccacacttacgtcattgtagtattgtttgtgaccctgagaaggcaaaagaaagaaccactcattgtctttgaggaagaagatgtccgtgagaacatcattacttatgatgatgaagggggtggggaagaagacacagaagcctttgatattgccaccctccagaatcctgatggtatcaatggatttatcccccgcaaagacatcaaacctgagtatcagtacatgcctagacctgggctccggccagcgcccaacagcgtggatgtcgatgacttcatcaacacgagaatacaggaggcagacaatgaccccacggctcctccttatgactccattcaaatctacggttatgaaggcaggggctcagtggccgggtccctgagctccctagagtcggccaccacagattcagacttggactatgattatctacagaactggggacctcgttttaagaaactagcagatttgtatggttccaaagacacttttgatgacgattcttaacaataacgatacaaatttggccttaagaactgtgtctggcgttctcaagaatctagaagatgtgtaaacaggtatttttttaaatcaaggaaaggctcatttaaaacaggcaaagttttacagagaggatacatttaataaaactgcgaggacatcaaagtggtaaatactgtgaaataccttttctcacaaaaaggcaaatattgaagttgtttatcaacttcgctagaaaaaaaaaacacttggcatacaaaatatttaagtgaaggagaagtctaacgctgaactgacaatgaagggaaattgtttatgtgttatgaacatccaagtctttcttcttttttaagttgtcaaagaagcttccacaaaattagaaaggacaacagttctgagctgtaatttcgccttaaactctggacactctatatgtagtgcatttttaaacttgaaatatataatattcagccagcttaaacccatacaatgtatgtacaatacaatgtacaattatgtctcttgagcatcaatcttgttactgctgattcttgtaaatctttttgcttctactttcatcttaaactaatacgtgccagatataactgtcttgtttcagtgagagacgccctatttctatgtcatttttaatgtatctatttgtacaattttaaagttcttattttagtatacatataaatatcagtattctgacatgtaagaaaatgttacggcatcacacttatattttatgaacattgtactgttgctttaatatgagcttcaatataagaagcaatctttgaaataaaaaaagattttttttt

SEQ ID NO: 486 - DNA, 471 bp, Homo sapiens
  modified_base (12): a, t, c, g, other or unknown
  modified_base (27): a, t, c, g, other or unknown
  modified_base (58): a, t, c, g, other or unknown
  modified_base (64): a, t, c, g, other or unknown
  modified_base (87): a, t, c, g, other or unknown
  modified_base (95): a, t, c, g, other or unknown
  modified_base (139): a, t, c, g, other or unknown
  modified_base (161): a, t, c, g, other or unknown
  modified_base (251): a, t, c, g, other or unknown
  modified_base (300): a, t, c, g, other or unknown
  modified_base (365): a, t, c, g, other or unknown
  modified_base (443): a, t, c, g, other or unknown
  modified_base (453): a, t, c, g, other or unknown
  modified_base (460): a, t, c, g, other or unknown
tttttttttttntttcgctttattttnatttatttatttatttatttatttatttatntatatntgagacagagtcttaacactgtngcccaggntggtagtgcaatggcgtgatctcagctcactgcaagctctgccncttggattcatgcctttctccngcctcagcctcccgagtagctgggactacaggggcccaccaccacgcccagctaattttttgtacttttagtagagacagggttttaccntgttagccagggtagtctcgatctcctgacctcgtgagccgcctgcctnggcctcccaaagtgctgggattacaggcatgagccaccgtgcctgggccacgtccctattttagnaaatgagaggagtgactgcacatagggaaaaatgccacttttaggcaatttcaaagtgggaaaaactttttttatatnaaaatttatnccaattnccaccctttgg

SEQ ID NO: 487 - DNA, 1035 bp, Homo sapiens
agctgctgtgcccagcctccatgttttaatatcaactctcactcctgaattcagttgctttgcccaagataggagttctctgatgcagaaattattgggctcttttagggtaagaagtttgtgtctttgtctggccacatcttgactaggtattgtctactctgaagacctttaatggcttccctctttcatctcctgagtatgtaacttgcaatgggcagctatccagtgacttgttctgagtaagtgtgttcattaatgtttatttagctctgaagcaagagtgatatactccaggacttagaatagtgcctaaagtgctgcagccaaagacagagcggaactatgaaaagtgggcttggagatggcaggagagcttgtcattgagcctggcaatttagcaaactgatgctgaggatgattgaggtgggtctacctcatctctgaaaattctggaaggaatggaggagtctcaacatgtgtttctgacacaagatccgtggtttgtactcaaagcccagaatccccaagtgcctgcttttgatgatgtctacagaaaatgctggctgagctgaacacatttgcccaattccaggtgtgcacagaaaaccgagaatattcaaaattccaaatttttttcttaggagcaagaagaaaatgtggccctaaagggggttagttgaggggtagggggtagtgaggatcttgatttggatctctttttatttaaatgtgaatttcaacttttgacaatcaaagaaaagacttttgttgaaatagctttactgtttctcaagtgttttggagaaaaaaatcaaccctgcaatcactttttggaattgtcttgatttttcggcagttcaagctatatcgaatatagttctgtgtagagaatgtcactgtagttttgagtgtatacatgtgtgggtgctgataattgtgtattttctttgggggtggaaaaggaaaacaattcaagctgagaaaagtattctcaaagatgcatttttataaattttattaaacaattttgtt

SEQ ID NO: 488 - DNA, 1372 bp, Homo sapiens
  modified_base (1362): a, t, c, g, other or unknown
  modified_base (1364): a, t, c, g, other or unknown
  modified_base (1366): a, t, c, g, other or unknown
  modified_base (1368): a, t, c, g, other or unknown
gttgttccctccgacgctggacgggagcagctggagcgggagcctggctgcgctaccgcggctgcctcctgctgtgcaggtccccgaccctctctctgtcctcattgcgcccagacgggccggcccagagctcccgggtcgtctttcgtgtggccgcgagacactcttgcactcctgtaatgagcctggcactgtgatgaaacacttttcccgtgtcgtttgagtgcatcttctcaacaaccctaggagggttcttgaagcttttgagattaacaatggcaggaaaatcatcactttttaaagtaattctccttggagatggtggagttgggaagagttcacttatgaacagatatgtaactaataagtttgatacccagctcttccatacaataggtgtggaatttttaaataaagatttggaagtggatggacattttgttaccatgcagatttgggacacggcaggtcaggagcgattccgaagcctgaggacaccattttacagaggttctgactgctgcctgcttacttttagtgtcgatgattcacaaagcttccagaacttaagtaactggaagaaagaattcatatattatgcagatgtgaaagagcctgagagctttccttttgtgattctgggtaacaagattgacataagcgaacggcaggtgtctacagaagaagcccaagcttggtgcagggacaacggcgactatccttattttgaaacaagtgcaaaagatgccacaaatgtggcagcagcctttgaggaagcggttcgaagagttcttgctaccgaggataggtcagatcatttgattcagacagacacagtcaatcttcaccgaaagcccaagcctagctcatcttgctgttgattgttagattgttgatgcattctaaccaactcacacatatacacaaaatcaacatggggatggagaagagaattagcgtttgcagcagtgtatcatctactaataaaattaaactaatgttgctgcttcattagttggtgggagaagggacacatccactcttggaggaatatatttactcaataatggcaccttacatttataaattgtaacagttgtctaataacgtttctttaatttaaatatgtaagttgcagagctaataaatgaaatgaccaagactttaattataataaaaataagaaacttgactattctagaagttatacttggattttttcctgggaaaatggagaactactttttatatgtgtatgtttttatgcaattagcattgtattcttggttcagggaaatactttcctaaagcaataatgttagatattaaagattaaaatctaatgtatttgcaatgcaaaananananaaaa

SEQ ID NO: 489 - DNA, 727 bp, Homo sapiens
ccggaaccagaactggaatccgcccttaccgcttgctgccaaaacagtgggggctgaactgacctctcccctttgggagagaaaaactgtctgggagcttgacaaaggcatgcaggagagaacaggagcagccacagccaggagggagagccttccccaagcaaacaatccagagcagctgtgcaaacaacggtgcataaatgaggcctcctggaccatgaagcgagtcctgagctgcgtcccggagcccacggtggtcatggctgccagagcgctctgcatgctggggctggtcctggccttgctgtcctccagctctgctgaggagtacgtgggcctgtctgcaaaccagtgtgccgtgccagccaaggacagggtggactgcggctacccccatgtcacccccaaggagtgcaacaaccggggctgctgctttgactccaggatccctggagtgccttggtgtttcaagcccctgcaggaagcagaatgcaccttctgaggcacctccagctgcccccggccgggggatgcgaggctcggagcacccttgcccggctgtgattgctgccaggcactgttcatctcagcttttctgtccctttgctcccggcaagcgcttctgctgaaagttcatatctggagcctgatgtcttaacgaataaaggtcccatgctccacccgaggacagttcttcgtgcctgagaaaaaaacaaaggggcggccg

SEQ ID NO: 490 - DNA, 3316 bp, Homo sapiens
ggccgtgcggcccgccggggccatggcgaagaagagcgccgagaacggcatctatagcgtgtccggcgacgagaagaagggtcctctcatcgtgtccgggcccgatggtgccccgtccaagggcgatggccctgcgggcctgggggcgcccagcagccgcctggccgtgccgccgcgcgagacctggacgcgccagatggacttcatcatgtcgtgcgtgggcttcgccgtgggcttgggcaacgtgtggcgcttcccctacctgtgctacaagaacggcggaggtgtgttccttattccctacgtcctgatcgccctggttggaggaatccccattttcttcttagagatctcgctgggccagttcatgaaggccggcagcatcaatgtctggaacatctgtcccctgttcaaaggcctgggctacgcctccatggtgatcgtcttctactgcaacacctactacatcatggtgctggcctggggcttctattacctggtcaagtcctttaccaccacgctgccctgggccacatgtggccacacctggaacactcccgactgcgtggagatcttccgccatgaagactgtgccaatgccagcctggccaacctcacctgtgaccagcttgctgaccgccggtcccctgtcatcgagttctgggagaacaaagtcttgaggctgtctgggggactggaggtgccaggggccctcaactgggaggtgaccctttgtctgctggcctgctgggtgctggtctacttctgtgtctggaagggggtcaaatccacgggaaagatcgtgtacttcactgctacattcccctacgtggtcctggtcgtgctgctggtgcgtggagtgctgctgcctggcgccctggatggcatcatttactatctcaagcctgactggtcaaagctggggtcccctcaggtgtggatagatgcggggacccagattttcttttcttacgccattggcctgggggccctcacagccctgggcagctacaaccgcttcaacaacaactgctacaaggacgccatcatcctggctctcatcaacagtgggaccagcttctttgctggcttcgtggtcttctccatcctgggcttcatggctgcagagcagggcgtgcacatctccaaggtggcagagtcagggccgggcctggccttcatcgcctacccgcgggctgtcacgctgatgccagtggccccactctgggctgccctgttcttcttcatgctgttgctgcttggtctcgacagccagtttgtaggtgtggagggcttcatcaccggcctcctcgacctcctcccggcctcctactacttccgtttccaaagggagatctctgtggccctctgttgtgccctctgctttgtcatcgatctctccatggtgactgatggcgggatgtacgtcttccagctgtttgactactactcggccagcggcaccaccctgctctggcaggccttttgggagtgcgtggtggtggcctgggtgtacggagctgaccgcttcatggacgacattgcctgtatgatcgggtaccgaccttgcccctggatgaaatggtgctggtccttcttcaccccgctggtctgcatgggcatcttcatcttcaacgttgtgtactacgagccgctggtctacaacaacacctacgtgtacccgtggtggggtgaggccatgggctgggccttcgccctgtcctccatgctgtgcgtgccgctgcacctcctgggctgcctcctcagggccaagggcaccatggctgagcgctggcagcacctgacccagcccatctggggcctccaccacttggagtaccgagctcaggacgcagatgtcaggggcctgaccaccctgaccccagtgtccgagagcagcaaggtcgtcgtggtggagagtgtcatgtgacaactcagctcacatcaccagctcacctctggtagccatagcagcccctgcttcagccccaccgcacccctccagggggcctgcctttccctgacacttttggggtctgcctgggggaggaggggagaaagcaccatgagtgctcactaaaacaactttttccatttttaataaaacgccaaaaatatcacaacccaccaaaaatagatgcctctccccctccagccctagccgagctggtcctaggccccgcctagtgccccacccccacccacagtgctgcactcctcctgcccctgccacgcccaccccctgcccacctctccaggctctgctctgcagcacacccgtgggtgacccctcaccccagaagcagcagtggcagcttgggaaatgtgaggaagggaaggagggagagacgggagggaggagagagaggagaagggaggcaggggaggggcagcagaaccaaggcaaatatttcagctgggctatacccctctccccatccctgttatagaagcttagagagccagccagcaatggaaccttctggttcctgcgccaatcgccaccagtatcaattgtgtgagcttgggtgcgagtgcacgcgtgcgtgagtacggagagtatatatagatctctatctcttagcaaaggtgaatgccagatgtaaatggcgcctctgggcaaaggaggcttgtattttgcacattttataaaaacttgagagaatgagatttctgcttgtatatttctaaaaagaggaaggagcccaaaccatcctctccttaccactcccatccctgtgagccctaccttacccctctgcccctagccaaggagtgtgaatttatagatctaactttcataggcaaaacaaaagcttcgagctgttgcgtgtgtgagtctgttgtgtggatgtgcgtgtgtggtccccagccccagactggattggaaaagtgcatggtgggggcctcggggctgtccccacgctgtccctttgccacaagtctgtggggcaagaggctgcaatattccgtcctgggtgtctgggctgctaacctggcctgctcaggcttcccaccctgtgcggggcacacccccaggaagggaccctggacacggctcccacgtccaggcttaaggtggatgcacttcccgcacctccagtcttctgtgtagcagctttaacccacgtttgtctgtcacgtccagtcccgagacggctgagtgaccccaagaaaggcttccccgacacccagacagaggctgcagggctggggctgggtgagggtggcgggcctgcggggacattctactgtgctaaaaagccactgcagacatagcaataaaaacatgtcattttccaaagcaaaaaaaaaa

SEQ ID NO: 491 - DNA, 1791 bp, Homo sapiens
ggaggctgcagcagcggaagaccccagtccagatccaggactgagatcccagaaccatgaacctggccatcagcatcgctctcctgctaacagtcttgcaggtctcccgagggcagaaggtgaccagcctaacggcctgcctagtggaccagagccttcgtctggactgccgccatgagaataccagcagttcacccatccagtacgagttcagcctgacccgtgagacaaagaagcacgtgctctttggcactgtgggggtgcctgagcacacataccgctcccgaaccaacttcaccagcaaatacaacatgaaggtcctctacttatccgccttcactagcaaggacgagggcacctacacgtgtgcactccaccactctggccattccccacccatctcctcccagaacgtcacagtgctcagagacaaactggtcaagtgtgagggcatcagcctgctggctcagaacacctcgtggctgctgctgctcctgctctccctctccctcctccaggccacggatttcatgtccctgtgactggtggggcccatggaggagacaggaagcctcaagttccagtgcagagatcctacttctctgagtcagctgaccccctccccgcaatccctcaaaccttgaggagaagtggggaccccacccctcatcaggagttccagtgctgcatgcgattatctacccacgtccacgcggccacctcaccctctccgcacacctctggctgtctttttgtactttttgttccagagctgcttctgtctggtttatttaggttttatccttccttttctttgagagttcgtgaagagggaagccaggattggggacctgatggagagtgagagcatgtgaggggtagtgggatggtggggtaccagccactggaggggtcatccttgcccatcgggaccagaaacctgggagagacttggatgaggagtggttgggctgtgcctgggcctagcacggacatggtctgtcctgacagcactcctcggcaggcatggctggtgcctgaagaccccagatgtgagggcaccaccaagaatttgtggcctaccttgtgagggagagaactgagcatctccagcattctcagccacaaccaaaaaaaaataaaaagggcagccctccttaccactgtggaagtccctcagaggccttggggcatgacccagtgaagatgcaggtttgaccaggaaagcagcgctagtggagggttggagaaggaggtaaggatgagggttcatcatccctccctgcctaaggaagctaaaagcatggccctgctgcccctccctgcctccacccacagtggagagggctacaaaggaggacaagaccctctcaggctgtcccaagctcccaagagcttccagagctctgacccacagcctccaagtcaggtggggtggagtcccagagctgcacagggtttggcccaagtttctaagggaggcacttcctcccctcgcccatcagtgccagcccctgctggctggtgcctgagcccctcagacagccccctgccccgcaggcctgccttctcagggacttctgcggggcctgaggcaagccatggagtgagacccaggagccggacacttctcaggaaatggcttttcccaacccccagcccccacccggtggttcttcctgttctgtgactgtgtatagtgccaccacagcttatggcatctcattgaggacaaagaaaactgcacaataaaaccaagcctctggaatctaaaaaaaaaaaaaaaaaaaa

SEQ ID NO: 492 - DNA, 1799 bp, Homo sapiens
cccagtgctgcaggctgtgtgggtagctgagcagagctaagcggcttgacggaccaacatctctccagctggttgaagacaagctctcagaagacaatgctgcatgtcacagccccagcaaccaacaacaccagcctgacaacttgctggggtggccgccttgtggtctgaggtggccgtctaaactatgtggtctgatctcaggctgcagaccttgcaggactgtcttcacacagactggaagtgctaacaggtggtgaggacaccgctttacaacgatgcagggggccccatgtcaccctcacccatgggaagtttgacttggtggactcagccaagccacagaggtctaacgcttctctgcggtgatttcaggctgccctggcagaaagcacagtgcctgcagacatgctgtcactgctccacacatcaacgctggcagtccttggggctctgtgtgtatatggtgcaggtcacctagagcaacctcaaatttccagtactaaaacgctgtcaaaaacagcccgcctggaatgtgtggtatctggaataacaatttctgcaacatctgtatattggtatcgagagagacctggtgaagtcatacagttcctggtgtccatttcatatgacggcactgtcagaaaggaatccggcattccgtcaggcaaatttgaggtggataggatacctgaaacgtctactaccactctcaccattcacaatgtagagaaacaggacatagctacctactactgtgccttgtgggaggtgtaactttcgaattattataagaaactctttggcagtggaacaacacttgttgtcacagataaacaacttgatgcagatgtttcccccaagcccactatttttcttccttcaattgctgaaacaaagctccagaaggctggaacatacctttgtcttcttgagaaatttttccctgatgttattaagatacattggcaagaaaagaagagcaacacgattctggggatcccaggaggggaacaccatgaagactaacgacacatacatgaaatttagctggttaacggtgccagaaaagtcactggacaaagaacacagatgtatcgtcagacatgagaataataaaaacggagttgatcaagaaattatctttcctccaataaagacagatgtcatcacaatggatcccaaagacaattgttcaaaagatgcaaatgatacactactgctgcagctcacaaacacctctgcatattacacgtacctcctcctgctcctcaagagtgtggtctattttgccatcatcacctgctgtctgcttagaagaacggctttctgctgcaatggagagaaatcataacagacggtggcacaaggaggccatcttttcctcatcggttattgtccctagaagcgtcttctgaggatctagttgggctttctttctgggtttgggccatttcagttctcatgtgtgtactattctatcattattgtataacggttttcaaaccagtgggcacacagagaacctcactctgtaataacaatgaggaatagccacggcgatctccagcaccaatctctccatgttttccacagctcctccagccaacccaaatagcgcctgctatagtgtagacatcctgcggcttctagccttgtccctctcttagtgttctttaatcagataactgcctggaagcctttcattttacacgccctgaagcagtcttctttgctagttgaattatgtggtgtgtttttccgtaataagcaaaataaatttaaaaaaatgaaaagtt

SEQ ID NO: 493 - DNA, 1258 bp, Homo sapiens
ggacggcaggaccaagaagcagctcgccatggtggaaggaaccatgaactggcatctccccctcttcctcttggcctctgtgacgctgccttccatctgctcccacttcaatcctctgtctctcgaggaactaggctccaacacggggatccaggttttcaatcagattgtgaagtcgaggcctcatgacaacatcgtgatctctccccatgggattgcgtcggtcctggggacgcttcagctgggggcggacggcaggaccaagaagcagctcgccatggtgatgagatacggcgtaaatggagttggtaaaatattaaagaagatcaacaaggccatcgtctccaagaagaataaagacattgtgacagtggctaacgccgtgtttgttaagaatgcctctgaaattgaagtgccttttgttacaaggaacaaagatgtgttccagtgtgaggtccggaatgtgaactttgaggatccagcctctgcctgtgattccatcaatgcatgggttaaaaacgaaaccagggatatgattgacaatctgctgtccccagatcttattgatggtgtgctcaccagactggtcctcgtcaacgcagtgtatttcaagggtctgtggaaatcacggttccaacccgagaacacaaagaaacgcactttcgtggcagccgacgggaaatcctatcaagtgccaatgctggcccagctctccgtgttccggtgtgggtcgacaagtgcccccaatgatttatggtacaacttcattgaactgccctaccacggggaaagcatcagcatgctgattgcactgccgactgagagctccactccgctgtctgccatcatcccacacatcagcaccaagaccatagacagctggatgagcatcatggtgcccaagagggtgcaggtgatcctgcccaagttcacagctgtagcacaaacagatttgaaggagccgctgaaagttcttggcattactgacatgtttgattcatcaaaggcaaattttgcaaaaataacaaggtcagaaaacctccatgtttctcatatcttgcaaaaagcaaaaattgaagtcagtgaagatggaaccaaagcttcagcagcaacaactgcaattctcattgcaagatcatcgcctccctggtttatagtagacagaccttttctgtttttcatccgacataatcctacaggtgctgtgttattcatggggcagataaacaaaccctgaagagtatacaaaagaaaccat

SEQ ID NO: 494 - DNA, 3086 bp, Homo sapiens
ggcggtcccctgttctccccgctcaggtgcggcgctgtggcaggaagccaccccctcggtcggccggtgcgcggggctgttgcgccatccgctccggctttcgtaaccgcaccctgggacggcccagagacgctccagcgcgagttcctcaaatgttttcctgcgttgccaggaccgtccgccgctctgagtcatgtgcgagtgggaagtcgcactgacactgagccgggccagagggagaggagccgagcgcggcgcggggccgagggactcgcagtgtgtgtagagagccgggctcctgcggatgggggctgcccccggggcctgagcccgcctgcccgcccaccgccccgccccgcccctgccacccctgccgcccggttcccattagcctgtccgcctctgcgggaccatggagtggtagccgaggaggaagcatgctggccgtcggctgcgcgctgctggctgccctgctggccgcgccgggagcggcgctggccccaaggcgctgccctgcgcaggaggtggcgagaggcgtgctgaccagtctgccaggagacagcgtgactctgacctgcccgggggtagagccggaagacaatgccactgttcactgggtgctcaggaagccggctgcaggctcccaccccagcagatgggctggcatgggaaggaggctgctgctgaggtcggtgcagctccacgactctggaaactattcatgctaccgggccggccgcccagctgggactgtgcacttgctggtggatgttccccccgaggagccccagctctcctgcttccggaagagccccctcagcaatgttgtttgtgagtggggtcctcggagcaccccatccctgacgacaaaggctgtgctcttggtgaggaagtttcagaacagtccggccgaagacttccaggagccgtgccagtattcccaggagtcccagaagttctcctgccagttagcagtcccggagggagacagctctttctacatagtgtccatgtgcgtcgccagtagtgtcgggagcaagttcagcaaaactcaaacctttcagggttgtggaatcttgcagcctgatccgcctgccaacatcacagtcactgccgtggccagaaacccccgctggctcagtgtcacctggcaagacccccactcctggaactcatctttctacagactacggtttgagctcagatatcgggctgaacggtcaaagacattcacaacatggatggtcaaggacctccagcatcactgtgtcatccacgacgcctggagcggcctgaggcacgtggtgcagcttcgtgcccaggaggagttcgggcaaggcgagtggagcgagtggagcccggaggccatgggcacgccttggacagaatccaggagtcctccagctgagaacgaggtgtccacccccatgcaggcacttactactaataaagacgatgataatattctcttcagagattctgcaaatgcgacaagcctcccagtgcaagattcttcttcagtaccactgcccacattcctggttgctggagggagcctggccttcggaacgctcctctgcattgccattgttctgaggttcaagaagacgtggaagctgcgggctctgaaggaaggcaagacaagcatgcatccgccgtactctttggggcagctggtcccggagaggcctcgacccaccccagtgcttgttcctctcatctccccaccggtgtcccccagcagcctggggtctgacaatacctcgagccacaaccgaccagatgccagggacccacggagcccttatgacatcagcaatacagactacttcttccccagatagctggctgggtggcaccagcagcctggaccctgtggatgacaaaacacaaacgggctcagcaaaagatgcttctcactgccatgccagcttatctcaggggtgtgcggcctttggcttcacggaagagccttgcggaaggttctacgccaggggaaaatcagcctgctccagctgttcagctggttgaggtttcaaacctccctttccaaatgcccagcttaaaggggttagagtgaacttgggccactgtgaagagaaccatatcaagactctttggacactcacacggacactcaaaagctgggcaggttggtgggggcctcggtgtggagaagcggctggcagcccacccctcaacacctctgcacaagctgcaccctcaggcaggtgggatggatttccagccaaagcctcctccagccgccatgctcctggcccactgcatcgtttcatcttccaactcaaactcttaaaacccaagtgccttagcaaattctgtttttctaggcctggggacggcttttacttaaaccgccaaggctgggggaagaagctctctcctccctttcttccctacagttgaaaaacagctgagggtgagtgggtgaataatacagtatctcagggcctggtcgttttcaacagaattataattagttcctcattagcattttgctaaatgtgaatgatgatcctaggcatttgctgaatacagaggcaactgcattggctttgggttgcaggacctcaggtgagaagcagaggaaggagaggagaggggcacagggtctctaccatcccctgtagagtgggagctgagtgggggatcacagcctctgaaaaccaatgttctctcttctccacctcccacaaaggagagctagcagcagggagggcttctgccatttctgagatcaaaacggttttactgcagctttgtttgttgtcagctgaacctgggtaactagggaagataatattaaggaagacaatgtgaaaagaaaaatgagcctggcaagaatgcgtttaaacttggtttttaaaaaactgctgactgttttctcttgagagggtggaatatccaatattcgctgtgtcagcatagaagtaacttacttaggtgtgggggaagcaccataactttgtttagcccaaaaccaagtcaagtgaaaaaggaggaagagaaaaaatattttcctgccaggcatggtggcccacgcacttcgggaggtcgaggcagga

SEQ ID NO: 495 - DNA, 420 bp, Homo sapiens
  modified_base (339): a, t, c, g, other or unknown
  modified_base (352): a, t, c, g, other or unknown
  modified_base (372): a, t, c, g, other or unknown
  modified_base (382): a, t, c, g, other or unknown
  modified_base (406): a, t, c, g, other or unknown
tgattcaggaaattggatacaactgtgtagcagacatctggtccctgggaataactgccatagaaatggctgaaggaaagcccccttatgctgatatccatccaatgagggcaatcttcatgattcctacaaatcctcctcccacattccgaaaaccagagctatggtcagataactttacagattttgtgaaacagtgtcttgtaaagagccctgagcagagggccacagccacttcaggttcctgcaggcacccatttgttcagggagttgccaaagggagtgttcaattattgcgaggatttaatttaatggaaggccatgggatgtggaaattgnaaacgccaggggnttcccagcagcggggaagtnggaccggggncgttgaaggaaaatttcaggaagngggttgaattgggt

SEQ ID NO: 496 - DNA, 1575 bp, Homo sapiens
  modified_base (1312)..(1342): a, t, c, g, other or unknown
  modified_base (1345): a, t, c, g, other or unknown
  modified_base (1360): a, t, c, g, other or unknown
  modified_base (1366): a, t, c, g, other or unknown
cccagactccctccggagttcttcttggggctgatgtccgcaaatatgcagaattaccggccgggtcgctcctgaagccagcgcggggagcgagcgcggcggcggccagcaccgggaacgcaccgaggaagaagcccagcccccgccctccgccccttccgtccccacccccatcccggcggcccaggaggctccccgcgctggcgcgcactccctgtttctcctcctcctggctggcgctgcctgcctctccgcactcactgctcgcagccgggcgcgctccgccagctccgtgctccccgcgccaccctcctccgggccgcgctccctaagggatggtactgaatttcgccgccacaggagaccggctggagcgcccgccccgcggcctcgcctctcctccgagcagccagcgcctcgggacgcgatgaggaccttggcttgcctgctgctcctcggctgcggatacctcgcccatgttctggccgaggaagccgagatcccccgcgaggtgatcgagaggctggcccgcagtcagatccacagcatccgggacctccagcgactcctggagatagactccgtagggagtgaggattctttggacaccagcctgagagctcacggggtccatgccactaagcatgtgcccgagaagcggcccctgcccattcggaggaagagaagcatcgaggaagctgtccccgctgtctgcaagaccaggacggtcatttacgagattcctcggagtcaggtcgaccccacgtccgccaacttcctgatctggcccccgtgcgtggaggtgaaacgctgcaccggctgctgcaacacgagcagtgtcaagtgccagccctcccgcgtccaccaccgcagcgtcaaggtggccaaggtggaatacgtcaggaagaagccaaaattaaaagaagtccaggtgaggttagaggagcatttggagtgcgcctgcgcgaccacaagcctgaatccggattatcgggaagaggacacgggaaggcctagggagtcaggtaaaaaacggaaaagaaaaaggttaaaacccacctaaagcagccaaccagatgtgaggtgaggatgagccgcagccctttcctgggacatggatgtacatggcgtgttacattcctgaacctactatgtacggtgctttattgccagtgtgcggtctttgttctcctccgtgaaaaactgtgtccgagaacactcgggagaacaaagagacagtgcacatttgtttaatgtgacatcaaagcaagtattgtagcactcggtgaagcagtaagaagcttccttgtcnnnnnnnnnnnnnnnnnnnnnnnnnnnnnnnacnaaaccacaaatgacnaaaacnaaacggactcacaaaaatatctaaactcgatgagatggagggtcgccccgtgggatggaagtgcagaggtctcagcagactggatttctgtccgggtggtcacaggtgcttttttgccgaggatgcagagcctgctttgggaacgactccagagggtgctggtgggctctgcaggggcccgcaggaagcaggaatgtcttggaaaccgc

SEQ ID NO: 497 - DNA, 2666 bp, Homo sapiens
ccggccgggcgcgccgagcccgagccccagccggagcggggcgggggagggaggagccagagcggccgccgcctctgccggaggagccgcggggccgccacactcgccccccgccccccccgcgctcactcgcactcacacccgggcgcaggaggcgggcggcccgggccccaccggccccccatggacgcccccagcacgggggcgctgagacccccgcgtcgctgcccagcccggtccggcgcgccacgccgagggatctctggacaggacaagactccgaagctactcccccagcacacagcccgggacccacaaacccagcttgcccccagccctcccacctgccactccctggcccctcccaccgcccgccccccttggggcgcaggggcatggtgtgaaaggccaagtgctgaggcgggtatcatgggtgctgtgccctagggcctgggtggcagggggtgggtggcctgtgggtgtgccgggggggccagtgtgcccaccccagtctcttgggcgtgctggagggcatcctggatggaattgaagtgaatggaacagaagccaagcaaggtggagtgtgggtcagacccagaggagaacagtgccaggtcaccagatggaaagcgaaaaagaaagaacggccaatgttccctgaaaaccagcatgtcagggtatatccctagttacctggacaaagacgagcagtgtgtcgtgtgtggggacaaggcaactggttatcactaccgctgtatcacttgtgagggctgcaagggcttctttcgccgcacaatccagaagaacctccatcccacctattcctgcaaatatgacagctgctgtgtcattgacaagatcacccgcaatcagtgccagctgtgccgcttcaagaagtgcatcgccgtgggcatggccatggacttggttctagatgactcgaagcgggtggccaagcgtaagctgattgagcagaaccgggagcggcggcggaaggaggagatgatccgatcactgcagcagcgaccagagcccactcctgaagagtgggatctgatccacattgccacagaggcccatcgcagcaccaatgcccaggggcagccattggaaacagaggcggaaattcctgcccgatgacattggccagtcacccattgtctccatgccggacggagacaaggtggacctggaagccttcagcgagtttaccaagatcatcaccccggccatcacccgtgtggtggactttgccaaaaaactgcccatgttctccgagctgccttgcgaagaccagatcatcctcctgaaggggtgctgcatggagatcatgtccctgcgggcggctgtccgctacgaccctgagagcgacaccctgacgctgagtggggagatggctgtcaagcgggagcagctcaagaatggcggcctgggcgtagtctccgacgccatctttgaactgggcaagtcactctctgcctttaacctggatgacacggaagtggctctgctgcaggctgtgctgctaatgtcaacagaccgctcgggcctgctgtgtgtggacaagatcgagaagagtcaggaggcgtacctgctggcgttcgagcactacgtcaaccaccgcaaacacaacattccgcacttctggcccaagctgctgatgaaggtgactgacctccgcatgatcggggcctgccacgccagccgcttcctccacatgaaagtcgagtgccccaccgaactcttccccccactcttcctcgaggtctttgaggatcaggaagtctaaagcctcaggcggccagagggtgtgcggagctggtggggaggagcctggagagaaggggcagagctgggggctgagggagacccccccacaccccttctctccttcctctcgtccttggatagattcagctcccacacacacacccgcactgcccaggtccctcctcagacctccagccctgggacagggcaaacaactgaacttgctatggaaaggacagtgtgggaggctgggggagctgtgtcctgcagttcccaggaccccatcctctcagaaggtaggggaagggcgggaggattgagaagggacaagccaccttgaccgtaggggaaggaggaatgtgggctgggggaagatgccctcaactcaccccctacacacacatgagagagagcccccacccagttccttggcctaggtctcccctccaggctgagggcctctctacttccccagatgcctgggtgcaaagaacggcttggcttggctcctcctctggaggttaaaatttatagtcattctaactgcactttggaaaccaagcaaggggagaagacaaatgaagaaaaactagacagagagaaaaatacaaaaaagagagagcgagcgatagagagagatgatattaagttattaactgaggctgaccagaggggaggaccccccctttaccaccccatgcactttgcgagctgccccttcttcccccacatcagagagaaatgcccccacaccagagccccttctcctggtggcgggtctgcagggctgggagagggcagggcgttgtgagagagagaccgtccataaggaggacagtaactcctgtcctgggaactcctgggcggggggggagggggacactgcccagaggcgc

SEQ ID NO: 498 - DNA, 949 bp, Homo sapiens
gggaacaacgcatttgacacttgactgggatacactaccggatcctccgagggtgatggttctcaagaaggcagaagcaatggtgaccaatagacctccttaaaggctgagccgctgggcaccttcctactcctctcgaccgtgctaggatgactgcagcagagtccccgagtcctttgatgcaagggtctagcaaccaccaaacagacaagcccttcggcctgtcctggagggcgttgaatggcatggcctggagctcaaccaggagaaccgtgctcaggaggaagagaccagaaggataactcaaaaagttctgagaagttcctaagaccacctgaagagaaggagcctgctgccaatggtgtggacaccgcagtgtgcttgaggagacttcagaaacgagaactgtttcacacaatcatcaggtgagccgaggatccattggaggaaggcattatctgtatccagaggaaatagccaaggatattcagaggtgtgcctgggaagtttgagctgcagcagtggaaccttaatgcccaggatgatcctgtctaacaccacagcggtgacgccctttctgaccaagctgtggcaggagacagttcagcagggtggcaacatgtcgggcctggcccgcaggtccccccgcagcggtgacggcaagctggaggccctctacgtcctcatggtactgggattcttcggcttcttcaccctgggcatcatgctgagctacatccgctccaagaagctggagcactcgaacgacccattcaacgtctacatcgagtccgatgcctggcaagagaaggacaaggcctatgtccaggcccgggtcctggagagctacaggtcgtgctatgtcgttgaaaaccatctggccatagaacaacccaacacacaccttcctgagacgaagccttccccatgaaccccaccactggctaaa

SEQ ID NO: 499 - DNA, 5144 bp, Homo sapiens
  modified_base (2250)..(2549): a, t, c, g, other or unknown
gtaccagctggggccgtccggcaagatgtgagttgtcactctgctgcggcacagacctgaattaacaactctagctagggctgacttcaaaaagcactttcgttttttaataaccaacatcagctcagcaggcttcatttgggaaaagaaaccttgtcggattaccccgacattctccacctcctgggaggccagccattcccaaatgccccaaggatgaagaacggagacggtagacgcaccctctgaagatggtgactccctcctgagaagctggaccccttggtaaaagacaaggccttctccaagaagaatatgaaagtgttactcagacttatttgtttcatagctctactgatttcttctctggaggctgataaatgcaaggaacgtgaagaaaaaataattttagtgtcatctgcaaatgaaattgatgttcgtccctgtcctcttaacccaaatgaacacaaaggcactataacttggtataaagatgacagcaagacacctgtatctacagaacaagcctccaggattcatcaacacaaagagaagctttggtttgttcctgctaaggtggaggattcaggacattactattgcgtggtaagaaattcatcttactgcctcagaattaaaataagtgcaaaatttgtggagaatgagcctaacttatgttataatgcacaagccatatttaagcagaaactacccgttgcaggagacggaggacttgtgtgcccttatatggagttttttaaaaatgaaaataatgagttacctaaattacagtggtataaggattgcaaacctctacttcttgacaatatacactttagtggagtcaaagataggctcatcgtgatgaatgtggctgaaaagcatagagggaactatacttgtcatgcatcctacacatacttgggcaagcaatatcctattacccgggtaatagaatttattactctagaggaaaacaaacccacaaggcctgtgattgtgagcccagctaatgagacaatggaagtagacttgggatcccagatacaattgatctgtaatgtcaccggccagttgagtgacattgcttactggaagtggaatgggtcagtaattgatgaagatgacccagtgctaggggaagactattacagtgtggaaaatcctgcaaacaaaagaaggagtaccctcatcacagtgcttaatatatcggaaattgaaagtagattttataaacatccatttacctgttttgccaagaatacacatggtatagatgcagcatatatccagttaatatatccagtcactaatttccagaagcacatgattggtatatgtgtcacgttgacagtcataattgtgtgttctgttttcatctataaaatcttcaagattgacattgtgctttggtacagggattcctgctatgattttctcccaataaaagcttcagatggaaagacctatgacgcatatatactgtatccaaagactgttggggaagggtctacctctgactgtgatatttttgtgtttaaagtcttgcctgaggtcttggaaaaacagtgtggatataagctgttcatttatggaagggatgactacgttggggaagacattgttgaggtcattaatgaaaacgtaaagaaaagcagaagactgattatcattttagtcagagaaacatcaggcttcagctggctgggtggttcatctgaagagcaaatagccatgtataatgctcttgttcaggatggaattaaagttgtcctgcttgagctggagaaaatccaagactatgagaaaatgccagaatcgattaaattcattaagcagaaacatggggctatccgctggtcaggggactttacacagggaccacagtctgcaaagacaaggttctggaagaatgtcaggtaccacatgccagtccagcgacggtcaccttcatctaaacaccagttactgtcaccagccactaaggagaaactgcaaagagaggctcacgtgcctctcgggtagcatggagaagttgccaagagttctttaggtgcctcctgtcttatggcgttgcaggccaggttatgcctcatgctgacttgcagagttcatggaatgtaactatatcatcctttatccctgaggtcacctggaatcagattattaagggaataagccatgacgtcaatagcagcccagggcacttcagagtagagggcttgggaagatcttttaaaaaggcagtannnnnnnnnnnnnnnnnnnnnnnnnnnnnnnnnnnnnnnnnnnnnnnnnnnnnnnnnnnnnnnnnnnnnnnnnnnnnnnnnnnnnnnnnnnnnnnnnnnnnnnnnnnnnnnnnnnnnnnnnnnnnnnnnnnnnnnnnnnnnnnnnnnnnnnnnnnnnnnnnnnnnnnnnnnnnnnnnnnnnnnnnnnnnnnnnnnnnnnnnnnnnnnnnnnnnnnnnnnnnnnnnnnnnnnnnnnnnnnnnnnnnnnnnnnnnnnnnnnnnnnnnnnnnnnnnnnnnnnnnnnnnnnnnnnnnnnnnnnnccctctctgaatgtttgaactgccaagaaaaggcatggagacagcgaactagaagaaagggcaagaaggaaatagccaccgtctacagatggcttagttaagtcatccacagcccaagggcggggctatgccttgtctggggaccctgtagagtcactgaccctggagcggctctcctgagaggtgctgcaggcaaagtgagactgacacctcactgaggaagggagacatattcttggagaactttccatctgcttgtattttccatacacatccccagccagaagttagtgtccgaagaccgaattttattttacagagcttgaaaactcacttcaatgaacaaagggattctccaggattccaaagttttgaagtcatcttagctttccacaggagggagagaacttaaaaaagcaacagtagcagggaattgatccacttcttaatgctttcctccctggcatgaccatcctgtcctttgttattatcctgcattttacgtctttggaggaacagctccctagtggcttcctccatctgcaatgtcccttgcacagcccacacatgaaccatccttcccatgatgccgctcttctgtcatcccgctcctgctgaaacacctcccaggggctccacctgttcaggagctgaagcccatgctttcccaccagcatgtcactcccagaccacctccctgccctgtcctccagcttcccctcgctgtcctgctgtgtgaattcccaggttggcctggtggccatgtcgcctgcccccagcactcctctgtctctgctcttgcctgcacccttcctcctcctttgcctaggaggccttctcgcattttctctagctgatcagaattttaccaaaattcagaacatcctccaattccacagtctctgggagactttccctaagaggcgacttcctctccagccttctctctctggtcaggcccactgcagagatggtggtgagcacatctgggaggctggtctccctccagctggaattgctgctctctgagggagaggctgtggtggctgtctctgtccctcactgccttccaggagcaatttgcacatgtaacatagatttatgtaatgctttatgtttaaaaacattccccaattatcttatttaatttttgcaattattctaattttatatatagagaaagtgacctattttttaaaaaaatcacactctaagttctattgaacctaggacttgagcctccatttctggcttctagtctggtgttctgagtacttgatttcaggtcaataacggtcccccctcactccacactggcacgtttgtgagaagaaatgacattttgctaggaagtgaccgagtctaggaatgcttttattcaagacaccaaattccaaacttctaaatgttggaattttcaaaaattgtgtttagattttatgaaaaactcttctactttcatctattctttccctagaggcaaacatttcttaaaatgtttcattttcattaaaaatgaaagccaaatttatatgccaccgattgcaggacacaagcacagttttaagagttgtatgaacatggagaggacttttggtttttatatttctcgtatttaatatgggtgaacaccaacttttatttggaataataattttcctcctaaacaaaaacacattgagtttaagtctctgactcttgcctttccacctgctttctcctgggcccgctttgcctgcttgaaggaacagtgctgttctggagctgctgttccaacagacagggcctagctttcatttgacacacagactacagccagaagcccatgggagcagggatgtcacgtcttgaaaagcctattagatgttttacaaatttaattttgcagattattttagtctgtcatccagaaaatgtgtcagcatgcatagtgctaagaaagcaagccaatttggaaacttaggttagtgacaaaattggccagagagtgggggtgatgatgaccaagaattacaagtagaatggcagctggaatttaaggagggacaagaatcaatggataagcgtgggtggaggaagatccaaacagaaaagtgcaaagttattccccatcttccaagggttgaattctggaggaagaagacacattcctagttccccgtgaacttcctttgacttattgtccccactaaaacaaaacaaaaaacttttaatgccttccacattaattagattttcttgcagtttttttatggcatttttttaaagatgccctaagtgttgaagaagagtttgcaaatgcaacaaaatatttaattaccggttgttaaaactggtttagcacaatttatattttccctctcttgcctttcttatttgcaataaaaggtattgagccattttttaaatgacatttttgataaattatgtttgtactagttgatgaaggagttttttttaacctgtttatataattttgcagcagaagccaaattttttgtatattaaagcaccaaattcatgtacagcatgcatcacggatcaatagactgtacttattttccaataaaattttcaaactttgtactgttaaaa

SEQ ID NO: 500 - DNA, 2167 bp, Homo sapiens
  modified_base (875): a, t, c, g, other or unknown
  modified_base (886): a, t, c, g, other or unknown
  modified_base (895): a, t, c, g, other or unknown
  modified_base (1457): a, t, c, g, other or unknown
ctagatcgcgagcggccatttcctgtttctctgcagttttcctcagctttgggtggtggccgctgccgggcatcggcttccagtccgcggagggcgaggcggcgtggacagcggccccggcacccagcgccccgccgcccgcaagccgcgcgcccgtccgccgcgccccgagcccgccgcttcctatctcagcgccctgccgccgccgccgcggcccagcgagcggccctgatgcaggccatcaagtgtgtggtggtgggagacggagctgtaggtaaaacttgcctactgatcagttacacaaccaatgcatttcctggagaatatatccctactgtctttgacaattattctgccaatgttatggtagatggaaaaccggtgaatctgggcttatgggatacagctggacaagaagattatgacagattacgccccctatcctatccgcaaacagatgtgttcttaatttgcttttcccttgtgagtcctgcatcatttgaaaatgtccgtgcaaagtggtatcctgaggtgcggcaccactgtcccaacactcccatcatcctagtgggaactaaacttgatcttagggatgataaagacacgatcgagaaactgaaggagaagaagctgactcccatcacctatccgcagggtctagccatggctaaggagattggtgctgtaaaatacctggagtgctcggcgctcacacagcgaggcctcaagacagtgtttgacgaagcgatccgagcagtcctctgcccgcctcccgtgaagaagaggaagagaaaatgcctgctgttgtaaatgtctcagcccctcgttcttggtcctgtcccttggaacctttgtacgctttgctcaaaaaaaancaaaacaaaanaacaaaaantaacaacggtggagccttcgcactcaatgccaactttttgttacagattaatttttccataaaaccattttttgaaccaatcagtaattttaaggttttgtttgttctaaatgtaagagttcagactcacattctattaaaatttagccctaaaatgacaagccttcttaaagccttatttttcaaaagcgccccccccattcttgttcagattaagagttgccaaaataccttctgaactacactgcattgttgtgccgagaacaccgagcactgaactttgcaaagaccttcgtctttgagaagacggtagcttctgcagttaggaggtgcagacacttgctctcctatgtagttctcagatgcgtaaagcagaacagcctcccgaatgaagcgttgccattggaactcaccagtggagttagcagcacgtgttcccgacataacattgtactgtaatggagtgagcgtagcagctcagctctttggatcagtcttgtgatttcatagcgagttttctgaccagccctctttgccggcagcactttctgaaccagcacanctgcttactttccctcctaactgaacgaacttcctgctattacgccttgctgcgcgctgctagcccgagcgcctgcgcgcgtctgtctagcttgctgcacctccacacacgcgcatccacacacgcatctacgtctactttctctgcagccacacacaactatccgcacacgctgcgacgcactcttaccacttaccacttggtaccaacggcaactgcaaagctgtcacggcgtaacaaacctcttacaaacggttaactcttctgctcaaactgcagctacgatgactgcaaagaaagcgttggctattatcacggaaactgttttctctaagccttttccctttctcttacacctgccatgcctccccaaattgggcatttaattcatctttaaactggttgttctgttagtcgctaacttagtaagtgcttttcttatagaaccccttctgactgagcaatatgcctccttgtattataaaatctttctgataatgcattagaaggtttttttgtcgattagtaaaagtgctttccatgttactttattcagagctaataagtgctttccttagttttctagtaactaggtgtaaaaatcatgtgttgcagctatagtttttaaaatattttagatattcttaaactatgaaccttcttaacatcactgtcttgccagattaccgacactgtcacttgaccaatac

SEQ ID NO: 501 - DNA, 1483 bp, Homo sapiens
ctcctgccccaccaccgctgctcctcagcaggcgcctcaccagcctccacaccccttgcgcccgcagaaacgcgcctgggccctgagctgtgcaccaccgacactctccaggctccggacacgatgcaggccatcaagtgtgtggtggtgggagatggggccgtgggcaagacctgccttctcatcagctacaccaccaacgcctttcccggagagtacatccccaccgtgtttgacaactattcagccaatgtgatggtggacagcaagccagtgaacctggggctgtgggacactgctgggcaggaggactacgaccgtctccggccgctctcctatccacagacggacgtcttcctcatctgcttctccctcgtcagcccagcctcttatgagaacgtccgcgccaagtggttcccagaagtgcggcaccactgccccagcacacccatcatcctggtgggcaccaagctggacctgcgggacgacaaggacaccatcgagaaactgaaggagaagaagctggctcccatcacctacccgcagggcctggcactggccaaggagattgactcggtgaaatacctggagtgctcagctctcacccagagaggcctgaaaaccgtgttcgacgaggccatccgggccgtgctgtgccctcagcccacgcggcagcagaagcgcgcctgcagcctcctctaggggttgcaccccagcgctcccacctagatgggtctgatcctccaggatccccacccaaagcctgatggcaccccggctggccatgctgtcccctccctgtggcgtttcttagcagatggctgcagagcttcgttgatggtcttttctgtactggaggcctcctgaggccaggaacgtgcaaatttgcaggtgctgcatcccaagcccctcatgctcctgccttcctgagggccagaggggagccccaggacccattaagccacccccgtgttcctgccgtcagtgccaactgccgcatgtggaagcatctacccgttcactccagtcccaccccacgcctgactcccctctggaaactgcaggccagatggttgctgccacaacttgtgtaccttcagggatggggctcttactccctcctgaggccagctgctctaatatcgatggtcctgcttgccagagagttcctctacccagcaaaaatgagtgtctcagaagtgtgctcctctggcctcagttctcctcttttggaacaacataaaacaaatttaattttctacgcctctggggatatctgctcagccaatggaaaatctgggttcaaccagcccctgccatttcttaagactttctgctgcactcacaggatcctgagctgcacttacctgtgagagtcttcaaacttttaaaccttgccagtcaggacttttgctattgcaaatagaaaacccaactcaacctgcttaagcagaaaataaatttattgattcaaaaaaaaaaa

SEQ ID NO: 502 - DNA, 3007 bp, Homo sapiens
cgtcagtgcgcggcccaccccggatgtcagccccccgcgccgaccagaatccgtgaaacatggcgaacgaggttatcaagtggcaaggctgcagttgcttgggaggctggaaagcctctgctccatagaggagatagaggtggcacccccaaaggctcatgaagttcgaatcaagatcattgccactgcggtttgcccacaccgatgcctataccctgagtggagctgatcctgagggttgttttccagtgatcttgggacatgaaggtgctggaattgtggaaagtgttggtgagggagttactaagctgaaggcgggtgacactgtcatcccactttacatcccacagtgtggagaatgcaaattttgtctaaatcctaaaactaacctttgccagaagataagagtcactcaagggaaaggattaatgccagatggtaccagcagatttacttgcaaaggaaagacaattttgcattacatgggaaccagcacattttctgaatacacagttgtggctgatatctctgttgctaaaatagatcctttagcacctttggataaagtctgccttctaggttgtggcatttcaaccggttatggtgctgctgtgaacactgccaagttggagcctggctctgtttgtgccgtctttggtctgggaggagtcggattggcagttatcatgggctgtaaagtggctggtgcttcccggatcattggtgtggacatcaataaagataaatttgcaagggccaaagagtttggagccactgaatgtattaaccctcaggattttagtaaacccatccaggaagtgctcattgagatgaccgatggaagagtggactattcctttgaatgtatggtaatgtgaaggtcatgagagcagcacttgaggcatgtcacaagggctggggcgtcagcgtcgtggttggagtagctgcttcaggtgaagaaattgccactcgtccattccagctggtaacaggtcgcacatggaaaggcactgcctttggaggatggaagagtgtagaaagtgtcccaaagttggtgtctgaatatatgtccaaaaagataaaagttgatgaatttgtgactcacaatctgtcttttgatgaaatcaacaaagcctttgaactgatgcattctggaaagagcattcgaactgttgtaaagatttaattcaaaagagaaaaataatgtccatcctgtcgtgatgtgataggagcagcttaacaggcagggagaagcgcctccaacctcacagcctcgtagagcttcacagctactccagaaaatagggttatgtgtgtcattcatgaatctctataatcaaggacaaggataattcagtcatgaacctgttttctggatgctcctccacataaataattgctagtttattaaggaatattttaacataataaaagtaatttctacatttgtgtggaaattgtcttgttttatgctgtcatcattgtcacggtttgtctgcccattatcttcattctgcaagggaaagggaaaggaagcagggcagtggtgggtgtctgaaacctcagaaacataacgttgaacttttaagggtctcagtccccgttgattaaagaacagatcctagccatcagtgacaaagttaatcaggacccaagtctgcttctgtgatattatctttaagggaggtactgtgccttgttcatacctgtaccccaaattcctaggatggcatctgcccttcagggggcactaaaatgtattattgaaacagcattctgggcttaaataggtgtatgtatgtgttggttgtgactgtactatttctagtatagtgaactacatactgaatatccaagttctcagcacctacttttgtcaaatcttaacattttgccacttcgagatcacattgccattcctcccctccagaggtaacaattatccacaatttgatgtttatcattcctgtgttgttgtactttcactgtgtataacctaaaccatctactctttagtactgttttatatatttttaagcctcatacttgctcattctacagcttttttcactcattattgtataattatatctgaagctctcgttcattaattttagtcctgtgtagcagaattcaattacgggaactaccataatttatctgttctccagttgaaggcatgaagttgttgccagtttctgtattataacactgtagtggaacattcttctgcattgggctcactgcgtgttacctaagacgtatcacagaataaacacatttagccttatagacattgccaaattgctcttcaaagtaaatgtgagtttttgtgaattacatgagtatggaatggtgttttattatgactttagtttgcattttcctcaattctcgttaaatccttcattctaatggacattttattgtgaagaacctgttcatatcctgtgctcaactttgtattgaattatttttctctgaataatttttaggagttcttttattctagacatcaatcatttgtcagttttatatgttgcaaatatcttctagtctatcttgtgacttttctttttactttatggtattttgttgaataaagttttaatgtagtcacataaaaaagatgactaagagggaggacgtttgggaggggaaagagtgtggggtgtggagatgtgagcacgcggcggggcgctgagggggggagcgcgggaagtgcggacgagggagaaaagagggggggcggcgcgcgggtcggggtgggaggcgtttgagggcacccggggcatggagagcccgctggtgcaggggcagcgcgggagggtggagcgagggtgatgcccccgagtatgggcgagtccggtgtagagtctcttgtgggaggatgtgcgtgggaggagagggcggttgtgccgcgcgggtaccgcgcgtgttgatgaaggtttgtagaacgcgcccccgagaatggcatgccggtgtgcatgtgagagtggtcgggggg

SEQ ID NO: 503 - DNA, 3426 bp, Homo sapiens
  modified_base (1410): a, t, c, g, other or unknown
  modified_base (1412): a, t, c, g, other or unknown
agccccccggcccgccatgggcgccgcggcccgcaccctgcggctggcgctcggcctcctgctgctggcgacgctgcttcgcccggccgacgcctgcagctgctccccggtgcacccgcaacaggcgttttgcaatgcagatgtagtgatcagggccaaagcggtcagtgagaaggaagtggactctggaaacgacatttatggcaaccctatcaagaggatccagtatgagatcaagcagataaagatgttcaaagggcctgagaaggatatagagtttatctacacggccccctcctcggcagtgtgtggggtctcgctggacgttggaggaaagaaggaatatctcattgcaggaaaggccgagggggacggcaagatgcacatcaccctctgtgacttcatcgtgccctgggacaccctgagcaccacccagaagaagagcctgaaccacaggtaccagatgggctgcgagtgcaagatcacgcgctgccccatgatcccgtgctacatctcctccccggacgagtgcctctggatggactgggtcacagagaagaacatcaacgggcaccaggccaagttcttcgcctgcatcaagagaagtgacggctcctgtgcgtggtaccgcggcgcggcgccccccaagcaggagtttctcgacatcgaggacccataagcaggcctccaacgcccctgtggccaactgcaaaaaaagcctccaagggtttcgactggtccagctctgacatcccttcctggaaacagcatgaataaaacactcatcccatgggtccaaattaatatgattctgctccccccttctccttttagacatggttgtgggtctggagggagacgtgggtccaaggtcctcatcccatcctccctctgccaggcactatgtgtctggggcttcgatccttgggtgcaggcagggctgggacacgcggcttccctcccagtccctgccttggcaccgtcacagatgccaagcaggcagcacttagggatctcccagctgggttagggcagggcctggaaatgtgcattttgcagaaacttttgagggtcgttgcaagactgtgtagcaggcctaccaggtccctttcatcttgagagggacatggcccttgttttctgcagcttccacgcctctgcactccctgcccctggcaagtgctcccatcgccccggtgcccaccatgagctcccagcacctgactccccccacatccaagggcagcctggaaccagtggctagttcttgaaggagccccatcaatcctattaatcctcagaattccagtgggagcctccctctgagccttgtagaaatgggagcgagaaaccccagctgagctgcgttccagcctcagctgagtctttttggtctgcacccaccccccnancctgctccccgcccacatgctccccagcttgcaggaggaatcggtgaggtcctgtcctgaggctgctgtccggggccggtggctgccctcaaggtcccttccctagctgctgcggttgccattgcttcttgcctgttctggcatcaggcacctggattgagttgcacagctttgctttatccgggcttgtgtgcagggcccggctgggctccccatctgcacatcctgaggacagaaaaagctgggtcttgctgtgccctcccaggcttagtgttccctccctcaaagactgacagccatcgttctgcacggggctttctgcatgtgacgccagctaagcatagtaagaagtccagcctaggaagggaaggattttggaggtaggtggctttggtgacacactcacttctttctcagcctccaggacactatggcctgttttaagagacatcttatttttctaaaggtgaattctcagatgataggtgaacctgagttgcagatataccaacttctgcttgtatttcttaaatgacaaagattacctagctaagaaacttcctagggaactagggaacctatgtgttccctcagtgtggtttcctgaagccagtgatatgggggttaggataggaagaactttctcggtaatgataaggagaatctcttgtttcctcccacctgtgttgtaaagataaactgacgatatacaggcacattatgtaaacatacacacgcaatgaaaccgaagcttggcggcctgggcgtggtcttgcaaaatgcttccaaagccaccttagcctgttctattcagcggcaaccccaaagcacctgttaagactcctgacccccaagtggcatgcagcccccatgcccaccgggacctggtcagcacagatcttgatgacttccctttctagggcagactgggagggtatccaggaatcggcccctgccccacgggcgttttcatgctgtacagtgacctaaagttggtaagatgtcataatggaccagtccatgtgatttcagtatatacaactccaccagacccctccaacccatataacaccccacccctgttcgcttcctgtatggtgatatcatatgtaacatttactcctgtttctgctgattgtttttttaatgttttggtttgtttttgacatcagctgtaatcattcctgtgctgtgttttttattacccttggtaggtattagacttgcactttttttaaaaaaaggtttctgcatcgtggaagcatttgacccagagtggaacgcgtggcctatgcaggtggattccttcaggtctttcctttggttctttgagcatctttgctttcattcgtctcccgtctttggttctccagttcaaattattgcaaagtaaaggatctttgagtaggttcggtctgaaaggtgtggcctttatatttgatccacacacgttggtcttttaaccgtgctgagcagaaaacaaaacaggttaagaagagccgggtggcagctgacagaggaagccgctcaaataccttcacaataaatagtggcaatatatatatagtttaagaaggctctccatttggcatcgtttaatttatatgttatgttctaagcacagctctcttctcctattttcatcctgcaagcaactcaaaatatttaaaataaagtttacattgtagttattttcaaatctttgcttgataagtattaagaaatattggacttgctgccgtaatttaaagctctgttgattttgtttccgtttggatttttgggggaggggagcactgtgtttatgctggaatatgaagtctgagaccttccggtgctgggaacacacaagagttgttgaaagttgacaagcagactgcgcatgtctctgatgctttgtatcattcttgagcaatcgctcggtccgtggacaataaacagtattatcaaagaatgatacaaagcatcagagacatgcgcagtctgcttgtcaactttcaacaactcttgtgtg

SEQ ID NO: 504 - DNA, 2345 bp, Homo sapiens
taatacagcaaaaagatttgctttctcggcttcagtgtgggcggtaactccatcgtgcaatgagaaaggcgaatttcttccagacaccaatcccggaggtcgcttctgttgctaggctcccagaaagcagggttcggacgtcattgggaggcgaggctagagcggggttgtgtgtggcggagggaggcggggctggaggaaacgctcgttgctaaggaacgcagcgctcttcccgctctggagaggcgcgactgggcttgcgcagtgtcgacgccggcgccggcgcgccggggtttgaaaggcccgagcctcgcgcgcttgcgcactttagccagcgcagggcgcaccccgctccctcccactctccctgcccctcggaccccatactctacctcatccttctggccaggcgaagcccacgacgttgacatgccggagatccgcctccgccatgtcgtgtcctgcagcagccaggactcgactcactgtgcagaaaatcttctcaaggcagacacttaccgaaaatggcgggcagccaaggcaggcgagaagaccatctctgtggtcctacagttggagaaggaggagcagatacacagtgtggacattgggaatgatggctcagctttcgtggaggtgctggtgggcagttcagctggaggcgctggggagcaagactatgaggtccttctggtcacctcatctttcatgtccccttccgagagccgcagtggctcaaaccccaaccgcgttcgcatgtttgggcctgacaagctggtccgggcagccgccgagaagcgctgggaccgggtcaaaattgtttgcagccagccctacagcaaggactccccctttggcttgagttttgtacggtttcatagccccccagacaaagatgaggcagaggccccgtcccagaaggtgacagtgaccaagcttggccagttccgtgtgaaggaggaggatgagagcgccaactctctgaggccgggggctctcttcttcagccggatcaacaagacatccccagtcacagccagcgacccggcaggacctagctatgcagctgctaccctccaggcttctagtgctgcctcctcagcctctccagtctccagggccataggcagcacctccaagccccaggagtctcccaaagggaagaggaagttggatttgaaccaagaagaaaagaagacccccagcaaaccaccagcccagctgtcgccatctgttcccaagagacctaaattgccagctccaactcgtaccccagccacagccccagtccctgcccgagcacagggggcagtgacaggcaaaccccgaggagaaggcaccgagcccagacgaccccgagctggcccagaggagctggggaagatccttcagggtgtggtagtggtgctgagtggcttccagaaccccttccgctccgagctgcgagataaggccctagagcttggggccaagtatcggccagactggacccgggacagcacgcacctcatctgtgcctttgccaacacccccaagtacagccaggtcctaggcctgggaggccgcatcgtgcgtaaggagtgggtgctggactgtcaccgcatgcgtcggcggctgccctcccagaggtacctcatggcagggccaggttccagcagtgaggaggatgaggcctctcacagcggtggcagcggagatgaagcccccaagcttcctcagaagcaaccccagaccaaaaccaagcccactcaggcagctggacccagctcaccccagaagcccccaacccctgaagagaccaaagcagcctcaccagtgctccaggaagatatagacattgagggggtacagtcagaaggacaggacaatggggcggaagattctggggacacagaggatgagctgaggagggtggcagagcagaaggaacacagactgccccctggccaggaggagaatggggaagacccgtatgcaggctccacggatgagaacacggacagtgaggaacaccaggagcctcctgatctgccagtccctgagctcccagatttcttccagggcaagcacttctttctttacggggagttccctggggacgagcggcggaaactcatccgatacgtcacagccttcaatggggagctcgaggactatatgagtgaccgggttcagtttgtgatcacagcacaggaatgggatcccagctttgaggaggccctgatggacaacccctccctggcattcgttcgtccccgatggatctacagttgcaatgagaagcagaagttacttcctcaccagctctatggggtggtgccgcaagcctgaagtatgtgctatac

SEQ ID NO: 505 - DNA, 1334 bp, Homo sapiens
gctgggtggagggaacgactcggcagcctcttctggccctgaggaagacgtcgatattttggcacgaggggagccactgaaggactaccctacccttgcgagggaccgcaggaggtgacgcccctgggcctcggtgggcgcttctggcggttttcgatgtggcaacccccatcagccaggataatgatgagatcttacaggtgaacaaggtgatgtccatcttgttttatgtgatatttctcgcttatctccgtggcatccaaggtaacaacatggatcaaaggagtttgccagaagactcgctcaattccctcattattaagctgatccaggcagatattttgaaaaacaagctctccaagcagatggtggacgttaaggaaaattaccagagcaccctgcccaaagctgaggctccccgagagccggagcggggagggcccgccaagtcagcattccagccggtgattgcaatggacaccgaactgctgcgacaacagagacgctacaactcaccgcgggtcctgctgagcgacagcacccccttggagcccccgcccttgtatctcatggaggattacgtgggcagccccgtggtggcgaacagaacatcacggcggaaacggtacgcggagcataagagtcaccgaggggagtactcggtatgtgacagtgagagtctgtgggtgaccgacaagtcatcggccatcgacattcggggacaccaggtcacggtgctgggggagatcaaaacgggcaactctcccgtcaaacaatatttttatgaaacgcgatgtaaggaagccaggccggtcaaaaacggttgcaggggtattgatgataaacactggaactctcagtgcaaaacatcccaaacctacgtccgagcactgacttcagagaacaataaactcgtgggctggcggtggatacggatagacacgtcctgtgtgtgtgccttgtcgagaaaaatcggaagaacatgaattggcatctctccccatatataaattattactttaaattatatgatatgcatgtagcatataaatgtttatattgtttttatatattataagttgacctttatttattaaacttcagcaaccctacagtatataagcttttttctcaataaaatcagtgtgcttgccttccctcaggcctctcccatctgttaaaacttgttttgtgatccggctctcaggagtcactctgtaaaatctgtgtacaccagtattttgcattcagtattgtcaaggccatgactgttgttttagtaaacttgttaaaatcagatgatgtcagagttgtgtataaacacagtgtatatc

SEQ ID NO: 506 - DNA, 1613 bp, Homo sapiens
ataaaatgatgggctttgaaatgctggtcagggtagagtgagaagcaccagcaggcagtaacagccaacccttagccattgctaagggcagagaactggtggagcctttctcttactcccaggacttcagcacctaagacagctccaaaacaaaccagaacagtcagctccgggggagcaccgactgggcgagaggcacagaaatggacaccagaaataaggcccagctccttgtgctcctgactcttctcagtgtgctcttctcacagacttcggcatggcctctttacagggcaccttctgctctcaggttgggtgacagaataccctttgagggagcaaatgaacctgatcaagtttcattaaaagaagacattgacatgttgcaaaatgcattagctgaaaatgacacaccctattatgatgtatccagaaatgccaggcatgctgatggagttttcaccagtgacttcagtaaactcttgggtcaactttctgccaaaaagtaccttgagtctcttatgggaaaacgtgttagcagtaacatctcagaagaccctgtaccagtcaaacgtcactcagatgcagtcttcactgacaactatacccgccttagaaaacaaatggctgtaaagaaatatttgaactcaattctgaatggaaagaggagcagtgagggagaatctcccgactttccagaagagttagaaaaatgatgaaaaagacctttggagcaaagctgatgacaacttcccagtgaattcttgaaggaaaatgatacgcaacataattaaattttgagttctacataagtaattcaagaaaacaacttcaatatccaaaccaaataaaaatattgtgttgtgaatgttgtgatgtattctagctaatgtaataactgtgaagtttacattgtaaatagtatttgagagttctaaattttgtctttaactcataaaaagcctgcaatttcatatgctgtatatcctttctaacaaaaaaatatatttaatgataagtaaatgctaggttaattccaattatatgagacgtttttggaagagtagtaatagagcaaaattgatgtgtttatttatagagtgtacttaactattcaggagagtagaacagataatcagtgtgtctaaatttgaatgttaagcagatggaatgctgtgttaaataaacctcaaaatgtctaagatagtaacaatgaagataaaaagacattcttccaaaaagattttcagaaaatattatgtgtttccatattttataggcaacctttatttttaatggtgttttaaaaaatctcaaatttggattgctaatcaccaaaggctctctcctgatagtctttcagttaaggagaacgacccctgcttctgacactgaaacttccctttctgcttgtgttaagtatgtgtaaaatgtgaagtgaatgaaacactcagttgttcaataataaatatttttgccataatgactcagaatattgctttggtcatatgagcttccttctgtgaaagtacatttggagacacaactatttttccaaaataattttaagaaatcaaagagagaaaataaagaccttgcttatgattgcagat

SEQ ID NO: 507 - DNA, 2351 bp, Homo sapiens
  modified_base (1380)..(1688): a, t, c, g, other or unknown
  modified_base (1953)..(2090): a, t, c, g, other or unknown
gctcagggcacatgcctcccctccccaggccgcggcccagctgaccctcggggctcccccggcagcggacagggaagggttaaaggcccccggctccctgccccctgccctggggaacccctggccctgtggggacatgaactgtgtttgccgcctggtcctggtcgtgctgagcctgtggccagatacagctgtcgcccctgggccaccacctggcccccctcgagtttccccagaccctcgggccgagctggacagcaccgtgctcctgacccgctctctcctggcggacacgcggcagctggctgcacagctgagggacaaattcccagctgacggggaccacaacctggattccctgcccaccctggccatgagtgcaggggcactgggagctctacagctcccaggtgtgctgacaaggctgcgagcggacctactgtcctacctgcggcacgtgcagtggctgcgccgggcaggtggctcttccctgaagaccctggagcccgagctgggcaccctgcaggcccgactggaccggctgctgcgccggctgcagctcctgatgtcccgcctggccctgccccagccacccccggacccgccggcgcccccgctggcgcccccctcctcagcctgggggggcatcagggccgcccacgccatcctgggggggctgcacctgacacttgactgggccgtgaggggactgctgctgctgaagactcggctgtgacccggggcccaaagccaccaccgtccttccaaagccagatcttatttatttatttatttcagtactgggggcgaaacagccaggtgatccccccgccattatctccccctagttagagacagtccttccgtgaggcctggggggcatctgtgccttatttatacttatttatttcaggagcaggggtgggaggcaggtggactcctgggtccccgaggaggaggggactggggtcccggattcttgggtctccaagaagtctgtccacagacttctgccctggctcttccccatctaggcctgggcaggaacatatattatttatttaagcaattacttttcatgttggggtggggacggaggggaaagggaagcctgggtttttgtacaaaaatgtgagaaacctttgtgagacagagaacagggaattaaatgtgtcatacatatccacttgagggcgatttgtctgagagctggggctggatgcttgggtaactggggcagggcaggtggaggggagacctccattcaggtggaggtcccgagtgggcggggcagcgactgggagatgggtcggtcacccagacagctctgtggaggcagggtctgagccttgcctggggccccgcactgcatagggccgnnnnnnnnnnnnnnnnnnnnnnnnnnnnnnnnnnnnnnnnnnnnnnnnnnnnnnnnnnnnnnnnnnnnnnnnnnnnnnnnnnnnnnnnnnnnnnnnnnnnnnnnnnnnnnnnnnnnnnnnnnnnnnnnnnnnnnnnnnnnnnnnnnnnnnnnnnnnnnnnnnnnnnnnnnnnnnnnnnnnnnnnnnnnnnnnnnnnnnnnnnnnnnnnnnnnnnnnnnnnnnnnnnnnnnnnnnnnnnnnnnnnnnnnnnnnnnnnnnnnnnnnnnnnnnnnnnnnnnnnnnnnnnnnnnnnnnnnnnnnnnnnnnnnnaggtcttcaataaatatttaatggaaggttccacaagtcaccctgtgatcaacagtacccgtatgggacaaagctgcaaggtcaagatggttcattatggctgtgttcaccatagcaaactggaaacaatctagatatccaacagtgagggttaagcaacatggtgcatctgtggatagaacaccacccagccgcccggagcagggactgtcattcagggaggctaaggagagaggcttgcttgggatatagaaagatatcctgnnnnnnnnnnnnnnnnnnnnnnnnnnnnnnnnnnnnnnnnnnnnnnnnnnnnnnnnnnnnnnnnnnnnnnnnnnnnnnnnnnnnnnnnnnnnnnnnnnnnnnnnnnnnnnnnnnnnnnnnnnnnnnnnnnnnnnnnnngtcctgacatgaaacagcaggctacaaaaccactgcatgctgtgatcccaattttgtgtttttctttctatatatggattaaaacaaaaatcctaaagggaaatacgccaaaatgttgacaatgactgtctccaggtcaaaggagagaggtgggattgtgggtgacttttaatgtgtatgattgtctgtattttacagaatttctgccatgactgtgtattttgcatgacacattttaaaaataataaacactatttttag

SEQ ID NO: 508 - DNA, 2485 bp, Homo sapiens
tcagaggaagaggaaggggcggactgctttgcggccggccgcggagcagtcagccgactacagagaagggtaatcgggtgtccccggcgccgcccggggccctgagggctggctagggtccaggccgggggggacgggacagacgaaccagccccgtgtaggaagcgcgacaatgccccgctacggagcgtcactccgccagagctgccccaggtccggccgggagcagggacaagacgggaccgccggagcccccggactcctttggatgggcctggcgctggcgctggcgctggcgctggcgctggcgctggcgctggcgctggctctgtctgactctcgggttctctgggctccggcagaggctcaccctctttctccccaaggccatcctgccaggttacatcgcatagtgccccggctccgagatgtctttgggtgggggaacctcacctgcccaatctgcaaaggtctattcaccgccatcaacctcgggctgaagaaggaacccaatgtggctcgcgtgggctccgtggccatcaagctgtgcaatctgctgaagatagcaccacctgccgtgtgccaatccattgtccacctctttgaggatgacatggtggaggtgtggagacgctcagtgctgagcccatctgaggcctgtggcctgctcctgggctccacctgtgggcactgggacattttctcatcttggaacatctctttgcctactgtgccgaagccgccccccaaaccccctagccccccagccccaggtgcccctgtcagccgcatcctcttcctcactgacctgcactgggatcatgactacctggaggggcacggaccctgactgtgcagacccactgtgctgccgccggggttctggcctgccgcccgcatcccggccaggtgccggatactggggcgaatacagcaagtgtgacctgcccctgaggaccctggagagcctgttgagtgggctgggcccagccggcccttttgatatggtgtactggacaggagacatccccgcacatgatgtctggcaccagactcgtcaggaccaactgcgggccctgaccaccgtcacagcacttgtgaggaagttcctggggccagtgccagtgtaccctgctgtgggtaaccatgaaagcacacctgtcaatagcttccctccccccttcattgagggcaaccactcctcccgctggctctatgaagcgatggccaaggcttgggagccctggctgcctgccgaagccctgcgcaccctcagaattggggggttctatgctctttccccataccccggtctccgcctcatctctctcaatatgaatttttgttcccgtgagaacttctggctcttgatcaactccacggatcccgcaggacagctccagtggctggtgggggagcttcaggctgctgaggatcgaggagacaaagtgcatataattggccacattcccccagggcactgtctgaagagctggagctggaattattaccgaattgtagccaggtatgagaacaccctggctgctcagttctttggccacactcatgtggatgaatttgaggtcttctatgatgaagagactctgagccggccgctggctgtagccttcctggcacccagtgcaactacctacatcggccttaatcctggttaccgtgtgtaccaaatagatggaaactactccaggagctctcacgtggtcctggaccatgagacctacatcctgaatctgacccaggcaaacataccgggagccataccgcactggcagcttctctacagggctcgagaaacctatgggctgcccaacacactgcctaccgcctggcacaacctggtatatcgcatgcggggcgacatgcaacttttccagaccttctggtttctctaccataagggccacccaccctcggagccctgtggcacgccctgccgtctggctactctttgtgcccagctctctgcccgtgctgacagccctgctctgtgccgccacctgatgccagatgggagcctcccagaggcccagagcctgtggccaaggccactgttttgctagggccccagggcccacatttgggaaagttcttgatgtaggaaagggtgaaaaagcccaaatgctgctgtggttcaaccaggcaagatcatccggtgaaagaaccagtccctgggccccaaggatgccggggaaacaggaccttctcctttcctggagctggtttagctggatatgggagggggtttggctgcctgtgcccaggagctagactgccttgaggctgctgtcctttcacagccatggagtagaggcctaagttgacactgccctgggcagacaagacaggagctgtcgccccaggcctgtgctgcccagccaggaaccctgtactgctgctgcgacctgatgctgccagtctgttaaaataaagataagagacttggactccaaaaaaaaaaaaaagg

SEQ ID NO: 509 - DNA, 5804 bp, Homo sapiens
ggagtccgtggcgagagcgcgctcagccccgccgcgatgcccgcgcgcccaggacgcctcctcccgctgctggcccggccggcgtgcctgactgcgctgctcttgcagctgctgggtcatggcggcggcgggcgctggggcgcccgggcccaggaggcggcggcgtgcggcggcggacgggccccccgcggcagacggcgaggacggacaggacccgcacagcaagcacctgtacacggccgacatgttcacgcacgggatccagagcgccgcgcacttcgtcatgttcttcgcgccctggtgtggacactgccagcggctgcagccgacttggaatgacctgggagacaaatacaacagcatggaagatgccaaagtctatgtggctaaagtggactgcacggcccactccgacgtgtgctccgcccagggggtgcgaggataccccaccttaaagcttttcaagccaggccaagaagctgtgaagtaccagggtcctcgggacttccagacactggaaaactggatgctgcagacactgaacgaggagccagtgacaccagggccggaagtggaaccgcccagtgcccccgagctcaagcaagggctgtatgagctctcagcaagcaactttgagctgcacgttgcacaaggcgaccactttatcaagttcttcgctccgtggtgtggtcactgcaaagccctggctccaacctgggagcagctggctctgggccttgaacattccgaaactgtcaagattggcaaggttgattgtacacagcactatgaactctgctccggaaaccaggttcgtggctatcccactcttctctggttccgagatgggaaaaaggtggatcagtacaagggaaagcgggatttggagtcactgagggagtacgtggagtcgcagctgcagcgcacagagactggagcgacggagaccgtcacgccctcagaggccccggtgctggcagctgagcccgaggctgacaagggcactgtgttggcactcactgaaaataacttcgatgacaccattgcagaaggaataaccttcatcaagttttatgctccatggtgtggtcattgtaagactctggctcctacttgggaggaactctctaaaaaggaattccctggtctggcgggggtcaagatcgccgaagtagactgcactgctgaacggaatatctgcagcaagtattcggtacgaggctaccccacgttattgcttttccgaggagggaagaaagtcagtgagcacagtggaggcagagaccttgactcgttacaccgctttgtcctgagccaagcgaaagacgaactttaggaacacagttggaggtcacctctcctgcccagctcccgcaccctgcgtttaggagttcagtcccacagaggccactgggttcccagtggtggctgttcagaaagcagaacatactaagcgtgaggtatcttctttgtgtgtgtgttttccaagccaacacactctacagattctttattaagttaagtttctctaagtaaatgtgtaactcatggtcactgtgtaaacattttcagtggcgatatatcccctttgaccttctcttgatgaaatttacatggtttcctttgagactaaaatagcgttgagggaaatgaaattgctggactatttgtggctcctgagttgagtgattttggtgaaagaaagcacatccaaagcatagtttacctgcccacgagttctggaaaggtggccttgtggcagtattgacgttcctctgatcttaaggtcacagttgactcaatactgtgttggtccgtagcatggagcagattgaaatgcaaaaacccacacctctggaagataccttcacggccgctgctggagcttctgttgctgtgaatacttctctcagtgtgagaggttagccgtgatgaaagcagcgttacttctgaccgtgcctgagtaagagaatgctgatgccataactttatgtgtcgatacttgtcaaatcagttactgttcaggggatccttctgtttctcacggggtgaaacatgtctttagttcctcatgttaacacgaagccagagcccacatgaactgttggatgtcttccttagaaagggtaggcatggaaaattccacgaggctcattctcagtatctcattaactcattgaaagattccagttgtatttgtcacctggggtgacaagaccagacaggctttcccaggcctgggtatccagggaggctctgcagccctgctgaagggccctaactagagttctagagtttctgattctgtttctcagtagtccttttagaggcttgctatacttggtctgcttcaaggaggtcgaccttctaatgtatgaagaatgggatgcatttgatctcaagaccaaagacagatgtcagtgggctgctctggccctggtgtgcacggctgtggcagctgttgatgccagtgtcctctaactcatgctgtccttgtgattaaacacctctatctcccttgggaataagcacatacaggcttaagctctaagatagataggtgtttgtccttttaccatcgagctacttcccataataaccactttgcatccaacactcttcacccacctcccatacgcaaggggatgtggatacttggcccaaagtaactggtggtaggaatcttagaaacaagaccacttatactgtctgtctgaggcagaagataacagcagcatctcgaccagcctctgccttaaaggaaatctttattaatcacgtatggttcacagataattctttttttaaaaaaacccaacctcctagagaagcacaactgtcaagagtcttgtacacacaacttcagctttgcatcacgagtcttgtattccaagaaaatcaaagtggtacaatttgtttgtttacactatgatactttctaaataaactctttttttttaaaagtctggtctttccttcaatgttacagcaaaacagatataaaatagacaataaattatagtttatatttacaaaaaaagctgtaagtgcaaacagttgtagattataaatgtattatttaatcagtttagtatgaaattgccttcccagtacatgattgtgaaaaagacatttagaaaatattctaaaatttaatctgagcctcactttctacaagggaaatcatgatttccgttcataaacagcatgctcatccccctaacaccattcttataagctgggcaccctcattttattttcttcgttggttctaaccctgtggcgtggtatgctgtatagtaaaaaggcagagaaccactttactgaaaaggtactagagccggcagtccagaagttaatgtgctggtcaaagaaccgttctggtaaagaagaggtgagcattgccttcacgtgttacacggttacacaccccttgtagcctcacctcagtgtaatcagtctacttttggtactagcaaagagtacagcaaatggaggattgaggtgtagaaatggtatgttttggctgaaataagtgtattttcacaccaacaaaactccagcacgaacatacaacagcaatgactgagacaagggcgccccgtggagccctggctgtggcctgggctgtgcgtcctgtggacttctgggaatgaactgaacagaggcgttccccccacttccccgatttctgttctctgtaaaatctacctttgatagacagtactgaaccagctgatcctttagccaagaatacatttaactcctttgagattattttccctatttactaacaaacaccccaaatagcttgatctacagctaaaactaattttggtgggtttttgggggaggagggtaggaagagcttcacggttatgtttctgcagttaccagaccttatgctacagacatccaaactcagcttgctacagaccaacaactactcacgtcatttaccaagtgagcaaattattaatgaggtcctttaaaatcttcctgggtaataaggcactggcatgagatagtttcaaagtctcatcgtcccacctccaactgtgcttccgtgtttttttaaggcagatgtaatctaggaatccaaggcagaatgtgtgtccccagcatctggtttcgagttagtggcatccacaagctcttacaaccatattcctgtattttttcagaatgacattggagttgtcatcaaagtaaagaaccgagatggcatttagcttagttggcgcacagcacggtttggggacatactcggggttcataaggtgaaccaaggtctgcacaatcgcgtggttggttgcattcatgtgtgcgttgagtgggaaggagcattctccatcacagtaattggcagcatagcccttgggtgcaatgatccagtcctgccatcccaggtcttggaaactcacatacagctcatgcttcctgcaggctgttttcaattcactgctgttgtaatctgaagcactggagacccgcgccacgtcctgggactgggtagagcgattacgactctgttgtcggcgccggctggaggctgacctggtggtgcgcacgtggacctcactcactttgaagaaagccaccatgaagggctgcttgtcgtaagggccgtctctgcccaccaggcctgcggctcgggggtggacgtggactccatcccttgtcaccacgctcagctgaagccccatgttatgctgtggagtcacaacccacagattgctagtggccgtgatgtcaaattccagccagccttcttctgaggcccatactacacgggtgtccaacaaaaacaggtcagagtctctgtgctgatgctcctgtaagacttgataaatgctgataagaaaagtttggtttttaaaactccccataacacagtccttgtagatgcggaattctgcagccgtcaccacctcaccctcaggaatctgggataagttgaacttgaactctttgtggtgtcgctgacgaggggagaactccttgtcgtactccaccaggttcacaaagctcatgaccatgtccgcgtcgttgaggaaggcgctgtcctgcgcgctggtcagtggggacgcgccgccgctgccagatccgggggccagaaggctcttgcggttgagcgggtgcgcggcgcccgggggcggctgccgacgctgggacgagctggctgcttcgtggggccaggactgctgcctctccccctccgacgccccgtcctcgtcgttgtcggcggacagggcgttgtacagatccagcatgaagaggggcgcggacttcagtcgcccgggagggggctctccgcgaggcagctgctgctgctgctgctgctcctcctgctgccggagcgccgggggctgcggctgttggaggccgtgcaggggccggggccggtgcgggagccccagcaccgacaagatctccttctgcatctcccgcttctcctgcgtcttgagccgccggtacaggaagcccgaggaggactgcggcgacggcggcggctgctccgtgcggccggggctcccgccgtcccccagcagctgccccccggcggcggcggccgcggcagcgggcaagggcggccgcagcggcgggggcccgcagcagctgcacagcagcccccaccaccagcacagccactgcgccctccgccccagccccggcatccccgcccggccgggctgcccccgcggatcccgcgaggcgtggagcggcggagcgaggccggagcgcggccgctgtggcccttggcgtgagcagtccccgccacctctcggcgggctcgcttcccc

SEQ ID NO: 510 - DNA, 5304 bp, Homo sapiens
  modified_base (3880): a, t, c, g, other or unknown
  modified_base (5276): a, t, c, g, other or unknown
  modified_base (5282): a, t, c, g, other or unknown
  modified_base (5287): a, t, c, g, other or unknown
agcacacacgcgctcacacacagagagaaaatccttctgcctgttgatttatggaaacaattatgattctgctggagaacttttcagctgagaaatagtttgtagctacagtagaaaggctcaagttgcaccaggcagacaacagacatggaattcttatatatccagctgttagcaacaaaacaaaagtcaaatagcaaacagcgtcacagcaactgaacttactacgaactgtttttatgaggatttatcaacagagttatttaaggaggaatcctgtgttgttatcaggaactaaaaggataaggctaacaatttggaaagagcaactactctttcttaaatcaatctacaattcacagataggaagaggtcaatgacctaggagtaacaatcaactcaagattcattttcattatgttattcatgaacacccggagcactacactataatgcacaaatggatactgacatggatcctgccaactttgctctacagatcatgctttcacattatctgtctagtgggtactatatctttagcttgcaatgacatgactccagagcaaatggctacaaatgtgaactgttccagccctgagcgacacacaagaagttatgattacatggaaggaggggatataagagtgagaagactcttctgtcgaacacagtggtacctgaggatcgataaaagaggcaaagtaaaagggacccaagagatgaagaataattacaatatcatggaaatcaggacagtggcagttggaattgtggcaatcaaaggggtggaaagtgaattctatcttgcaatgaacaaggaaggaaaactctatgcaaagaaagaatgcaatgaagattgtaacttcaaagaactaattctggaaaaccattacaacacatatgcatcagctaaatggacacacaacggaggggaaatgtttgttgccttaaatcaaaaggggattcctgtaagaggaaaaaaaacgaagaaagaacaaaaaacagcccactttcttcctatggcaataacttaattgcatatggtatataaagaaccagttccagcagggagatttctttaagtggactgttttctttcttctcaaaattttctttccttttattttttagtaatcaagaaaggctggaaaactactgaaaaactgatcaagctggacttgtgcatttatgtttgttttaagacactgcattaaagaaagatttgaaaagtatacacaaaaatcagatttagtaactaaaggttgtaaaaaattgtaaaactggttgtacaatcatgatgttagtaacagtaatttttttcttaaattaatttacccttaagagtatgttagatttgattatctgataatgattatttaaatattcctatctgcttataaaatggctgctataataataataatacagatgttgttatataaggtatatcagacctacaggcttctggcaggatttgtcagataatcaagccacactaactatggaaaatgagcagcattttaaatgctttctagtgaaaaattataatctacttaaactctaatcagaaaaaaaattctcaaaaaaactattatgaaagtcaataaaatagataatttaacaaaagtacaggattagaacatgcttatacctataaataagaacaaaatttctaatgctgctcaagtggaaagggtattgctaaaaggatgtttccaaaaatcttgtatataagatagcaacagtgattgatgataatactgtacttcatcttacttgccacaaaataacattttataaatcctcaaagtaaaattgagaaatctttaagtttttttcaagtaacataatctatctttgtataattcatatttgggaatatggcttttaataatgttcttcccacaaataatcatgcttttttcctatggttacagcattaaactctattttaagttgtttttgaactttattgttttgttatttaagtttatgttatttataaaaaaaaaaccttaataagctgtatctgtttcatatgcttttaattttaaaggaataacaaaactgtctggctcaactgcaagtttccctcccctttgtgactgacactaagctagcacacagcacttgggccagcaaatcctggaaggcagacaaaaataagagcctgaagcaatgcttacaatagatgtctcacacagaacaatacaaacatgtaaaaaatctttcaccacatattcttgccaattaattggatcatataagtaaaatcattacaaatataagtatttacaggattttaaagttagaatatatttgaatgcatgggtagaaaatatcatattttaaaactatgtatatttaaatttagtaattttctaatctctagaaatctctgctgttcaaaaggtggcagcactgaaagttgttttcctgttagatggcaagagcacaatgcccaaaatagaagatgcagttaagaataaggggccctgaatgtcatgaaggcttgaggtcagcctacagataacaggattattacaaggatgaatttccacttcaaaagtctttcattggcagatcttggtagcactttatatgtttaccaatgggaggtcaatatttatctaatttaaaaggtatgctaaccactgtggttttaatttcaaaatatttgtcataaaagtccctttacataaatagtatttggtaatacatttatagatgagagttatatgaaaaggctaggtcaacaaaaacaatagattcatttaattttcctgtggttgacctatacgaccaggatgtagaaaactagaaagaactgcccttcctcagatatactcttgggagagagcacgaatggtattctgaactatcacctgattcaaggactttgctagctaggttttgaggtcaggcttcagtaactgtagtcttgtgagcatattgagggcagaggaggacttagtttttcatatgtgtttccttagtgcctagcagactatctgttcataatcagttttcagtgtgaattcactgaatgtttatagacaaaagaaaatacacactaaaactaatcttcattttaaaagggtaaaacatgactatacagaaatttaaatagaaatagtgtatatacatataaaatacaagctatgttaggaccaaatgctctttgtctatggagttatacttccatcaaattacatagcaatgctgaattaggcaaaaccaacatttagtggtaaatccattcctggtagtataagtcacctaaaaaagacttctagaaatatgtactttaattatttgtttttctcctatttttaaatttattatgcaaattttagaaaataaaatttgctctagttacacacctttagaattctagaatattaaaactgtaaggggcctccatccctcttactcatttgtagtctaggaaattgagattttgatacacctaaggtcacgcagctgggtagatatacagctgtcacaagagtctagatcagttagcacatgctttctactcttcgattattagtattattagctaatggtctttggcatgtttttgttttttatttctgttgagatatagcctttacatttgtacacaaatgtgactatgtcttggcaatgcacttcatacacaatgactaatctatactgtgatgatttgactcaaaaggagaaaagaaattatgtagttttcaattctgattcctattcaccttttgtttatgaatggaaagctttgtgcaaaatatacatataagcagagtaagccttttaaaaatgttctttgaaagataaaattaaatacatgagtttctaacaattagaaaagaaaaaattaaaacatganatgataacaaaagtaaacaaaagatactttcaaagcagtgaacaaaacattttgacataagccataatataaattataatataaaaaataaaaaccatagtataaattgtcagcctttgagttggctacaaattcaatttaatgacagaagagaagggatgctggaggtaaattcttagggtttctatctcatagagtttgctcttctggttctctagactgccaaagaacataaagatgtgtgaggggacctagctgtagtaaaagcaatcctataacaagaaaaactctaaaacagtgccccttacgattttctactgaaatttctctaatagtagaggtgtaaaataagaagttagagaataatgcaaagggggcccaccacagacggaacatttcttttctcttaagactcatgtgatttttgcatcttactccataatatatttgtggttgcgttaatatgacaatgtctgcaattaaacaccagtaagcaaaattgatacatcagaatgacttgcagggcttatcatgcagtttggtttacatccctactccactgccatttacttgagcgtgaatgagacacaaaagattatttgcctcccataatccaactttacacataaataacacaaggctaaagaaaaccagaactcaaattcaccacgcataggagtgataacaaaaatatttaacagtcagtatgggtgattactggccaatcagaatacatcactgatacatcgaaatggatgcaggccactatgactaacttgtgggtatcatttctatgatcaccctaaaacagagttgggaaaatatctattaactggtctctctggtttgaattctcaatatgtatcttaatatgaaatagctcattaaaacttcatgtgtaactatttcagcattgttgtcagctactctttattccacttctgtacagtatttattcaaccaagctgctgctttcaatgaaggtcacttgttccttcagggacacatatactcccacctatcctttaattttgaatggtttgtcaggaaaatttactttctcttgagttgaaaaacttgacaggaagcaagaaataatacagtcctagcctctttccaataacatctgatttctccattctcaaactacacttctcaaggaaccagatatttactctcatctgggaagatgcctcttatgttttccttttacttcctggttatcatgtggttgcattttccaagttcttatcattgaatttatgagagcctatcaaaatttattttctttcatttatattctaataattgaaatgtgagatgaaaataacatttcacttatgaaaaacccttctcttgatgaatccttccatgtgttagttatctattgctgtgnaacaanttaanacttaatggcttgaaac

SEQ ID NO: 511 - DNA, 1314 bp, Homo sapiens
agctccaccctgggagggactgtggcccaggtactgcccgggtgctactttatgggcagcagctcagttgagttagagtctggaagacctcagaagacctcctgtcctatgaggccctccccatggctttagagacgatctgccgaccctctgggagaaaatccagcaagatgcaagccttcagaatctgggatgttaaccagaagaccttctatctgaggaacaaccaactagttgctggatacttgcaaggaccaaatgtcaatttagaagaaaagatagatgtggtacccattgagcctcatgctctgttcttgggaatccatggagggaagatgtgcctgtcctgtgtcaagtctggtgatgagaccagactccagctggaggcagttaacatcactgacctgagcgagaacagaaagcaggacaagcgcttcgccttcatccgctcagacagcggccccaccaccagttttgagtctgccgcctgccccggttggttcctctgcacagcgatggaagctgaccagcccgtcagcctcaccaatatgcctgacgaaggcgtcatggtcaccaaattctacttccaggaggacgagtagtactgcccaggcctgcctgttcccattcttgcatggcaaggactgcagggactgccagtcccccctgccccagggctcccggctatgggggcactgaggaccagccattgaggggtggaccctcagaaggcgtcacaacaacctggtcacaggactctgcctcctcttcaactgaccagcctccatgctgcctccagaatggtctttctaatgtgtgaatcagagcacagcagcccctgcacaaagcccttccatgtcgcctctgcattcaggatcaaaccccgaccacctgcccaacctgctctcctcttgccactgcctcttcctccctcattccaccttcccatgccctggatccatcaggccacttgatgacccccaaccaagtggctcccacaccctgttttacaaaaaagaaaagaccagtccatgagggaggtttttaagggtttgtggaaaatgaaaattaggatttcatgattttttttttcagtccccgtgaaggagagcccttcatttggagattatgttctttcggggagaggctgaggacttaaaatattcctgcatttgtgaaatgatggtgaaagtaagtggtagcttttcccttctttttcttctttttttgtgatgtcccaacttgtaaaaattaaaagttatggtactatgttagccccataacttttaatttttacaagttgtgggacatcac

SEQ ID NO: 512 - DNA, 4414 bp, Homo sapiens
  modified_base (4381): a, t, c, g, other or unknown
  modified_base (4388): a, t, c, g, other or unknown
  modified_base (4394): a, t, c, g, other or unknown
ctaacatgcttcttcatcacaggcactcagcagcacaaagactctcgtcctgaatcatttcccttcccctaaatgaaaccttgcttcttacctcgtgactgtaagaggcggggtttccgagacgaatgtttgaagtgggactgggtggcctcgtgatgaaggtcaaagctcgaggactcctgaactggatccagaggcaccatcccccttgcgagcatctcaggtccatgaacttgacctgggacctgttgtcctgataaatcaagctccaagtcttctagaagggtcacggcctcctctccactatcggggcggtattcctgcagccagacctggagctccttgggcaggatggaaagaaactgctctagcaccagaagctccaggatctgttccttggtgtttatttctggccgcagccactgatgacaaagttccttcagccgactgagagcctctcggggcccaaaagtgttctggtaacagaagcgcctgaagcgttggcggaatatctctgggtctggaggaggcgtgtcctgtagggtggaatcctgcccccacatgtggtcttcctcatcttcctcttccaccttcactattacgataccatccttctcctgtgcagcctgtggggacagacccgtggcttcccgtgattcagcagtcatcattcaggctccaggaactgacttgatccaaacagggtctgtgctcacctttatgtcctgggaggttttatgatgtgtttctttactattccgtgagccccgggagcggcctgggggcgctgggcgagaaaggggagctgactctggggctcaggccggccgaagggcaccggcgaggagggggctgccgcgggcgaggaggaggggtcgccgcgagccgaaggccttcgagacccgcccgccgcccggcggcgagagtagaggcgaggttgttgtgcgagcggcgcgtcctctcccgcccgggcgcgccgcgcttctcccagcgcaccgaggaccgcccgggcgcacacaaagccgccgcccgcgccgcaccgcccggcggccgccgcccgcgccagggagggattcggccgccgggccggggacaccccggcgccgccccctcggtgctctcggaaggcccaccggctcccgggcccgccggggaccccccggagccgcctcggccgcgccggaggagggcggggagaggaccatgtgagtgggctccggagcctcagcgccgcgcagtttttttgaagaagcaggatgctgatctaaacgtggaaaaagaccagtcctgcctctgttgtagaagacatgtggtgtatataaagtttgtgatcgttggcggaaattttggaatttagataatgggctgtgtgcaatgtaaggataaagaagcaacaaaactgacggaggagagggacggcagcctgaaccagagctctgggtaccgctatggcacagaccccacccctcagcactaccccagcttcggtgtgacctccatccccaactacaacaacttccacgcagccgggggccaaggactcaccgtctttggaggtgtgaactcttcgtctcatacggggaccttgcgtacgagaggaggaacaggagtgacactctttgtggccctttatgactatgaagcacggacagaagatgacctgagttttcacaaaggagaaaaatttcaaatattgaacagctcggaaggagattggtgggaagcccgctccttgacaactggagagacaggttacattcccagcaattatgtggctccagttgactctatccaggcagaagagtggtactttggaaaacttggccgaaaagatgctgagcgacagctattgtcctttggaaacccaagaggtacctttcttatccgcgagagtgaaaccaccaaaggtgcctattcactttctatccgtgattgggatgatatgaaaggagaccatgtcaaacattataaaattcgcaaacttgacaatggtggatactacattaccacccgggcccagtttgaaacacttcagcagcttgtacaacattactcagagagagctgcaggtctctgctgccgcctagtagttccctgtcacaaagggatgccaaggcttaccgatctgtctgtcaaaaccaaagatgtctgggaaatccctcgagaatccctgcagttgatcaagagactgggaaatgggcagtttggggaagtatggatgggtacctggaatggaaacacaaaagtagccataaagactcttaaaccaggcacaatgtcccccgaatcattccttgaggaagcgcagatcatgaagaagctgaagcacgacaagctggtccagctctatgcagtggtgtctgaggagcccatctacatcgtcaccgagtatatgaacaaaggaagtttactggatttcttaaaagatggagaaggaagagctctgaaattaccaaatcttgtggacatggcagcacaggtggctgcaggaatggcttacatcgagcgcatgaattatatccatagagatctgcgatcagcaaacattctagtggggaatggactcatatgcaagattgctgacttcggattggcccgattgatagaagacaatgagtacacagcaagacaaggtgcaaagttccccatcaagtggacggcccccgaggcagccctgtacgggaggttcacaatcaagtctgacgtgtggtcttttggaatcttactcacagagctggtcaccaaaggaagagtgccatacccaggcatgaacaaccgggaggtgctggagcaggtggagcgaggctacaggatgccctgcccgcaggactgccccatctctctgcatgagctcatgatccactgctggaaaaaggaccctgaagaacgccccacttttgagtacttgcagagcttcctggaagactactttaccgcgacagagccccagtaccaacctggtgaaaacctgtaaggcccgggtctgcggagagaggccttgtcccagaggctgccccacccctccccattagctttcaattccgtagccagctgctccccagcagcggaaccgcccaggatcagattgcatgtgactctgaagctgacgaacttccatggccctcattaatgacacttgtccccaaatccgaacctcctctgtgaagcattcgagacagaaccttgttatttctcagactttggaaaatgcattgtatcgatgttatgtaaaaggccaaacctctgttcagtgtaaatagttactccagtgccaacaatcctagtgctttccttttttaaaaatgcaaatcctatgtgattttaactctgtcttcacctgattcaactaaaaaaaaaaaagtattattttccaaaagtggcctctttgtctaaaacaataaaattttttttcatgttttaacaaaaaccaatcaggacaggtgtttgtttttgttttcttttttataaatatgaatatatataatatatatgtccctgtacatatacaatgtgggtgctaatgtggagactgtggccggcctgagccaccaagctgcgggacccagagggaggattttactgcaagtcagcatcaaagcaccggtgttattctgaaaacaccagtggcctcatttttggcttttgcaaagcatgaattttttcatttggattgcactttcctggttcatgactgtacctgtaggtggttgttactttgactcttttcaggaaccaccccccaagctgaatttacaagttctgttagcactatttgcttcaacttactgcgatttgttctcaaaacttaaaaataagcaagcaaatggctgatactaccaagagaactggaagatggataccacacaaacttcttgtataaaaatatgaatgctgaaatgtttcagacatttttaatttaataaacctgtaaccacatttaagtgatctaaaacccatagcattgtagtcatggcaacccgctaaactttctcatgcaactaaaatttctgggggaaatgagggtgggggttgtacatttcccattgtaaaataagtgttttaaatgtcctgtactgctaacgaatgactttctatatgtccaggagttctccagtggaataactatgcactactttacatttcatggggatgcacaaaaacaaaaaagtattacatttttagttgctgtttgtaccaaccttaaattacatatgtttaacaacaacaaatcaaaaatcctatttctattgagtttttaatactgactagcaactctgaagtcttaattccttttttgttatgatttatttgtgagtttacatttttaaattgtttaactttcttaatttagtaattaaaaagagagcattttacatttganaaaaaanaaaaangggcggccgccgactagtga

SEQ ID NO: 513 - DNA, 2703 bp, Homo sapiens
  modified_base (39): a, t, c, g, other or unknown
agaagggagacctgtgtacatttgctgatgtctagcacnccatatggtgtgctagacatcagcaaatgcaaagaagggagacctgtgtacatttcacttcctcattttctgtatgcaagtcctgatgtttcagaacctattgatggattaaacccaaatgaagaagaacataggacatacttggatattgaacctataactggattcactttacaatttgcaaaacggctgcaggtcaacctattggtcaagccatcagaaaaaattcaagtattaaagaatctgaagaggaactatattgtgcctattctttggcttaatgagactgggaccattggtgatgagaaggcaaacatgttcagaagtcaagtaactggaaaaataaacctccttggcctgatagaaatgatcttactcagtgttggtgtggtgatgtttgttgcttttatgatttcatattgtgcatgcagatcgaaaacaataaaataaacctggctcaagcacaaaccaatttgtgttgttctgattcaataattggtttctgggtggccaattcagaagaagagtgtacatgctcaacaaatcctaggccctgcattcctgtcatcctcatccgggggaaacaccatcatcccagtagctgccctattcaactgcaacagtctccaggaccatcagtatactgcatttcatgtgcaccaaatattttgaaagacatttataaataattggcttatgactcatatttctctatgaataccttcatacagcaggtataactcttttctttatgggcttaaatattttgtcactgatcctgcaaatggacatcattttagcacactagcggtttatattttaaggaccttcattctctgttctgcacctcttctggaaattgagtaaattttgcttttttttttttactcagttgcaacttacgcttggcatcttcagaatgcttttctagcattaagagatgtaaatgataaaggaattattgtatgaaatattacaaagcgtagactatgcattgttattcattataatattttttgctgtcataatcgcctcataaagacaggtttcaaccattaaaatatgttcttccttaaattcctgtgctttttctagttcctcttgtgtcataaaatgtttatcctaattttctctctgaagtatattttatctgaatccacatttctttataaatccatagtccttgctgaaatatgctttctaaatttctaccactttgttctaggctaattttttaagctaattggatgaagaacaaaaagacatttggtttcatcctttacagcagtaggacaattgcaaaggtttttcctttttcataaggagacacattaataggtaactctgtttcttgagcaggggttcacttattctgagagcattagttctcctaaaaagctccagcatagaaagggaagataaaccaaattctagcttgtgttttacccacagaaggatacaggacaaaggaatagtaactggcctgtttggatactaaaattgaaaataacttttagcctcctccttatgatagccgccagagtaaatgttgagcattactacagaaaagccacaaaccaagaatctacctgtttggaaagatcttttgcatctctgaaggtgcttaaagcatactttagtgcctttccttttaactgggaagataaaagaagtatctgtccaagatattaatatgtaagataacattgtagacatgttcttctgataatacaaggtttattctatttgcattaggatatttgtggacatgtccatctaatataaaggaaagttttttaatcattgaggcatgtagggctgagttatataatgtagaaacttctaaagataattggatgagaatatacatattgacctgtatattatgactaatcatgactcagatcttaatacagggatgatctcatagcatttagatatcagaaaaggttttgacctatatgtctttaatattttttgaatacatgtataatctttatcattcctcagtgtttcatttctcaaattctgtaaaaggaatataagaggaaagacaattcatatacaaagacaacgagattaaaaatatgcagtaggaaaaataattacttaaggggagattttttttacatgaaatctgggctttggatgtgtgtgtgtgtggtgtgtgtgtgtgcacatatgcactgtggtgggagtggggcaacttggggaatatgttacatgtgtgactttgttttgccctggcgaagttaatgttgttcagaaagggtaaatgtttggacacttgcaattgctcatggatgaatttatatgttttagtcatagaaaaattgtaccctttgatagaagcacattttctttccaaagttggttattaaccacagaattatagcaggtattcataacttaagtttgaaaatcaatagcgtctgcaaatggattaacagattagagaatcaacagcatcggaaaataggttaatgcatattgcttctaacaagtgcatgaagaaatagaagaagctatgtagctttcagttctgacagaaaagggtgaaggagggtatcatttcaagaaaaaaaatagctatcacgcaatggttatctctgaaaatatttgtattaagatgtgtatacatggccaggcatggtggctcatgcc

SEQ ID NO: 514 - DNA, 264 bp, Homo sapiens
ctgttcaaaacagtttattttattttatttttttttttgtcagacaaacacattgatttctggaccacagtagaggatggaaacctttcacaaacttatttatttgaaaatacaaatataaaattatactttccacatctgtgatgtgagagactgccatccacatagtaattttttacaacagggctttaagaaagccacacacaaagacctgaaagatgcttagatatatatatagatagatacatatatatgtatatatat

SEQ ID NO: 515 - DNA, 209 bp, Homo sapiens
  modified_base (22)..(23): a, t, c, g, other or unknown
  modified_base (25): a, t, c, g, other or unknown
  modified_base (161): a, t, c, g, other or unknown
  modified_base (197): a, t, c, g, other or unknown
ttggtcaaccacgccaaggganntntcagactcctttcacaagccagcttctgacccaggcagctgaccctcaccatggacactacaggccctggaatggccagggtggaccaaaagccatgccagctgggcatgaccccaggcagccagccacaggtganagggggcttgttggctgagtgatctgcagaggaganagcagccccagc

SEQ ID NO: 516 - DNA, 1215 bp, Homo sapiens
  modified_base (472)..(546): a, t, c, g, other or unknown
tgtgctcccatctttacccagccactgtgtccagtccatggtgcccccatctttgcccagccaccacctcttgtctgactccccgtcctccccttggtgctgggctcctgcctgtccctcctctgtcaagtgcacctggacctgggagtgaccttggagtgaccttgaccctggcagctccaactctcaacccgtcagccaggctccttgaaacctggctggagggaaacggcaaaccctgccacctggagtcgcctaaaattcgcagccacggtcctccaacaggccccacgcttcccgccagtccagcacatttcctggttaatttataattctgttttcccaggcagctattttgcaatttccaggctcaacaaagcctccaacagttcttcaccttcctaattccgagctgttgcccacatttgtttattttatcaaaagaacttccgggccgggtgcagtggctcannnnnnnnnnnnnnnnnnnnnnnnnnnnnnnnnnnnnnnnnnnnnnnnnnnnnnnnnnnnnnnnnnnnnnnnnnnccaatcggaagtgaatttaactagatgtagtaaccttttttttctttacttctaaaaaagttacagtttactaataaagttaagtctggttctgtcctagaggaaataaattcactattaattcatgtcttaagttacttgggttaaaacactttcagccacccagattaattaaagtggagcagtggagcccctggctgggagatggcctccagaggagcagctgcagggcatgttctgggcttagcgacagaggcaagcaagggactggtgtctctggtgagaggtgggtttgatgtatctctgtcctatgctggtctctcttctcctttataaaatcctctgtggtcaactgactactgcgtatcgcagtggaataagactgcacagttgctggtaggtgagtttaaagtcttaatctatgcattcagagaaatatttttatatgctttgtgtaatttataacaaggattttttttttagctttgttaactgtgaattcacccctcctcctccactgcatatttaaagcatgtgttcacactgtgtgtaaacattcactgaagattttttctttgtgcattgctgactgttcaaacataacaagtattattaaaattaaatattaactgactcaaaaaaacaaaaaagaaaagaaaaaaattggaa

SEQ ID NO: 517 - DNA, 3312 bp, Homo sapiens
tattattctgatggatacagataatgatcttttctcttgtgaggtatcttcatttatgcactgtccaaaaatagccatgtgtaagagtctttctgtatgacgaactacatggaaaagacttctgtggacataattctgaccgaaacccatgaagttacttcagtataagaagaacgttacacggaaatcaccaaatattttgcaactttatttcttctgacatggagtgaacatcaataggaatactttcaaagaaaatgaaaacacagaagcaaagagaaatgtggcacttcacattttaaactacagatggacttggtttgagggagggggaatcacagatttggtgctaagttaattagaaactggcagcgttttacagtagtacaccagcctggatgttttttctaaaatgtttacctgggagagctggggtttgtttgtgaggagaaagagtactgtggaaaacctctgcttgagtaccatgtggccaggcctatgtggatggctactccgtgctgtgcggcttcaccagcggttgggattggcccagcttggagtgcttgtgtggtccaacctcagtctggccccatagtgacttttgccccatgattctgcttcactgttggaatcctctttgaagttccccctctctttgctaaagcagtgaaggaagagaacagagacaaactctttggactgtgaaagagaaggtagagaattccaggcaacagtctgaccaagggtgtaaaccagtttattatatatatatttttcctttgaattaaaacctagagtgttgtatttttctttcttttttttttttttttttttttaccctttttctccttaggccaagtttagcttattcttatctttccacccaaacacctacacaacgtttaggcttcctgtaaggtttgaatgagacagatgtactctgaaggctggtggtaaatgtgtttgatgaccagactcttcatacagtcggcttgggccactttaaaggacaaaagccagagctcagctttatccctctcccagtgctgggagccaaaaaactgttgacagttttttgtgcagctcaagaaaactttgaaaagaacatgctttaactgaagcattggactctgcagctttctgtgtaaggcccgtgtactcccactgggcagggtgaggaccaaaaatctgaaactcttatgaatctgacatattatatggaaattatatcttgtgaccgtcttcaagtgcatggacttaaaattcatgagagactaaatgtgagggagaggtggatttaaagaggccagaccttaaccaaagatgctgagatacagcattctgtcccccctgccctagaaactccataaatgctgtcacaaccctatcattgctgatgctttctgcatgtcagcagtccaggaggatgctttttgtctctctttgcctccactttacaaaagataatatgatagaggcaacgtttataacagtcacatttaattataatgtacatcaaaggcagaatttcagaatggtttcttaaatttccttgggaacggtttccacatatcagttatagacaaaggccatgggactatgctaaaccaataaaaccttattagcaaatctttagattctgacttagccagagcatctgagtgttcaagtacagttttacagtggctaaggttgtctcttgatcttttttctccgttgtgtgatcacagatgctatttctgttttattggtgattatacgagacttctaatacataaatgaacgggtattggtgcctctttattttaaaaaatttgaagaaaagagccacctcatattcatagggtgtgtattttttgagtgtgagcatttaattgaaaataagaaagctatgaagtaaatgttaacttctctgtagcagctaatgcatagagacactaaaacccacaccacattttgtgggaaatgaggatcctgatcctcttttgtcctctccaggtagtctcgcaggttatgcagcttaagttcagtcttctttatgctgcgattgatttccacctcagtggcttagcctttgggacagtggatactgcaacagccaagaactcttggttatccgcacaagctgctggtagactacattagccctctggttttccagctcaacctctgataaagtggactgagagccacgctgctcagtctgtttcgtcagccgactcaggttattttcagggaaggcatggaggcatagtttggttagtttcatcactaggatgtataaggtgacgacacaaaccaaatacctttctttcatcacttaactatacgtactttatctctggtaacactagaatgctgtggtcttgagggaatgttagcaaggaacacatagaagatttggtgtttcataagcctgtctaggtgtggcaggttttgtgtggtacactgatgtttaccataagcaggtacaagcttcatgaaccgttcttaatgaactataattgaatagataccaaaaatagaatgacaaatgtattttaatagcagatgaggcagttttaggatgaattttccactgttgattttacttcaagacatagcaagagaaacaaaattttgttttcaagacatttccactgcagtttcaagctgtagtgggcatatgcttcatttacttccaaagaggcaaaagcagctggaattggcttacagcacatgctttgtttcatgttatgggtgaggacctacatacactcttactttagcagtcacttaaccttctccagcaaggcagttgtggggttcactaggatttagtgcctgatcttttttttgggaaggggcgggaatgaatgtgttggggctgggagggaagcagaagaaaatgggagtgtgagtgagtgtgcatgtgtctgaagttcaccattgcccccacctgcacctagcaaggaacaggtgtttgatgtattttgctcatgactgcagtatgcatgtatttttttccttctctgtgttttctaaacttacactaaaggattcatcaaatcatcttgttcagatggctcaggattgtatttattttgcttaccccgtgctcttgggttctatagtatttctataattatgtaacgagaatagtgttgcactgtaatctatcatatagagctatatgtatggaaaattttgatcaattttttaagaaatgtatcctgtttgcaaaggcacagtaaagttgcatcttatagactataggcaataaagctaacaataaaccttatttaacacaaaccaaaaaaaaaaaaaaaaagg

SEQ ID NO: 518 - DNA, 315 bp, Homo sapiens
  modified_base (234): a, t, c, g, other or unknown
  modified_base (236): a, t, c, g, other or unknown
  modified_base (248): a, t, c, g, other or unknown
  modified_base (298): a, t, c, g, other or unknown
  modified_base (309): a, t, c, g, other or unknown
ttttttccaggttagaatgcgcatctttcaaaaaaaaaaaaaaaaacaggtaaaataacttaaaggcaaaatttcttaaaaattagatccactacaatctttttgtatactaccatgccaactgtacacacatttacagcttttctgttgattgcattgtttgtgcattttttgtgtgtgtgaggtcttggctttgaaacagttaagtaaaaaccaaaaaggaagaccagttcncncggagttttacnaaaggaggcagaaaaaagggcaggtggcccagcgtttggcccagtagccncttccatggcncctttc

SEQ ID NO: 519 - DNA, 804 bp, Homo sapiens
gcctagcgcggcccaacctttactccagagatcatggctgccgaggatgtggtggcgactggcgccgacccaagcgatctggagagcggcgggctgctgcatgagattttcacgtcgccgctcaacctgctgctgcttggcctctgcatcttcctgctctacaagatcgtgcgcgacttcacccccgccgagctgcggcgcttcgacggcgtccaggacccgcgcatactcatggccatcaacggcaaggtgttcgatgtgaccaaaggccgcaaattctacgggcccgaggggccgtatggggtctttgctggaagagatgcatccaggggccttgccacattttgcctggataaggaagcactgaaggatgagtacgatgacctttctgacctcactgctgcccagcaggagactctgagtgactgggagtctcagttcactttcaagtatcatcacgtgggcaaactgctgaaggagggggaggagcccactgtgtactcagatgaggaagaaccaaaagatgagagtgcccggaaaaatgattaaagcattcagtggaagtatatctatttttgtattttgcaaaaccatttgtaacagtccactctgtctttaaaacatagtgattacaatatttagaaagttttgagcacttgctataagttttttaattaacatcactagtgacactaataaaattaacttcttagaatgcatgatgtgtttgtgtgtcacaaatccagaaagtgaactgcagtgctgtaatacacatgttaatactgtttttcttctatctgtagt

SEQ ID NO: 520 - DNA, 442 bp, Homo sapiens
aactaatattaaatagtaaatttaatgtgtattaatattgtcatataatattgtaattactcatgtaaatgtaaatattacattgaggatatagtaaatattaaatttactatgtcattgaggacagtatttcaaactagcttttttaaaaagaaaaacagaagatggcagtgaatagaacagtgattgttcatactacttggatctactgccttaatttatactaggatgtcaatccaccattgattttgtaccatcagtgcaaatgtcaacgtagcaaaaaaggcaaataatgtctgagtactattactaaaataattttgactttgtcaagccctgaaagggtctccaggaccctcatggggtttgtggatcaacttaaagaaccattgataaaatcaaatgagcaaactgggcttatgtttcttgaaaatattctggg

SEQ ID NO: 521 - DNA, 707 bp, Homo sapiens
atttggccctcgaggccaagaattcggcacgaggtttttctttaggcttctcatgcatatgaatattttaagcacgaatggactactaaatatctgagtttttttttttttaaagatcctaacagaacatagcgtaacaatattggtcttccaggtgttactcatttcaattatgtgtagtataccaggacagacctattttcatgtcttatttctttaaagagctgcttcattggccgggcgccatggctcacgtctgtaatcccagcactttgggaggccgaggcgggtgggttacttgaggtcaggagttcgagaccagcctggcaaacatggcgaaaccccatcttaactaaaaatacaaaaaaattagccgggtgtggtgtcacgcgcctgtaatcccagctacttggggggctcaggcaggagaattgcctgaacccaggaggcggaggttgcagtgagctgagattgggccactgcactccaccctgggcgacagagtgagactcggtctcagaaaaaaaaaaaaaagagctgcttcacatataaatgtctatagctagtagcctggccctttaatgtttaatttgaatagatatatctgttttccgtgaattatcttgaaagttttaaacaaaatgacctcatagtttttaaataaaaatattatttacctaaaatgtgctagtagcatctttgcccaa

SEQ ID NO: 522 - DNA, 6151 bp, Homo sapiens
  modified_base (740): a, t, c, g, other or unknown
  modified_base (2913): a, t, c, g, other or unknown
  modified_base (2937): a, t, c, g, other or unknown
  modified_base (2957): a, t, c, g, other or unknown
  modified_base (2961): a, t, c, g, other or unknown
  modified_base (2967): a, t, c, g, other or unknown
  modified_base (2983): a, t, c, g, other or unknown
tttttttttagtttctcaaaaatcagtaaaactttatggggttccattctttcgccattaacagaaaactggagaaagcaaaaatgtttcggtgtttacaaagataaactggcctctttacccagagatcaaaacctcaaactgacaagggggaagataaaaccgccctcccccacatcccctgagctgacccttgtcatcttaggacaaagccttcgagtccactggccaggggaccctgtatatggccaattcaagaagagggccaagaaatcagacccatccattcccgtgatataaagttgaacagaagctacaccaagggtcaagtgtctcgtattttacaggacacagtaaccaggcggctacttataaaaaaaaacaagattcatttcaggcacaacttttttattttttttttgttttgtttttaaatcagtaaaagaaaccgggtcctagaagctgcagtgatctaagcagcagcaagtttgtgcattcattttttttgtttttgtttaaatatgtttaaattatcacactgctggcactcctcatttgcatgaaattctgcaccatacttactaattcgtagtaaagttaccccccaacccacgaaaaaaaaacctactctggaagaaaattttcactgaaatataaccaaacttctttaagtgggattgtgacaagattataaatgatatgaaaaataacatttttaaaatttggccatccaactttanagaaatggtttgccctatacaaatttttgtaatttttaaaagataatatattctaccctcatatggtcctcagaattaagcataatgaacaggaagaaaaggaaaagaatgcaactgagtgctaaggcagaacatcttgccagaagtaattaatgaaggtagagtatataatgaaaagtgcagaatttcatagggccaacaagataacagtctatatttttcacttacacaggcaaagtggattctgcaattaccagttgcgttaaatgcaccaaataaagctcctaaaattgatactataaggcgccaccttaagtttttccaggctgcaactgtgcattatttaaaatggttttcttaaatttatttatttttttaaacataacacgaggaaggtgttaaaactggtgtaatagctcaatagaataagtattccagatttcgggagggatgaagagggagatattcagaacccttcaccagattccccccaacttgatcatagtggattaatggtgtgctttgtggatgtggttagtcaatgacaccagcttgacggatctttctttctgcaccaaaccccattgagttatctggtccccttggctgacgaagaaccattaggcgaggagcactggcatcatccagagtgatattcttcaagcgattgaccaaccgatcaggtcgaggagctgcaacagccttggggccctcacagactcgccaaacattacaggcgctgcacttgccagtgcgctgattaagaatcactgagaactccacctcatctcctgcctgtagctcaatgccatcctgaacttctttcacatggaaaaagagcttcttgctatctcctacttcatagttaatgaagccaaactgatctttcacacattccactgtggccctgcgcaggggtgtgatgttgtaagccatagtttgtgcattttggcccaggacacacaattggaacttgacgctctcccctttctgcaggcaatcccctttgttggccatcccaacgatgccaaatggatagacctcacctttcatatcgccctcctccacaatctcaatcattccttggtactcagtctgtgttggatcaacactcctcagggggcgaattactttgccagagtaaatggtgggatcagcttcctcagtaatgccattcactgagtgtgttttgttcactttttctgcactgactttgttgcctttgcctttggacaagctatactcgaccatgtcccccagttccaggctatcaacatcaccagagaactcactgtaatggaaaaagatttccttatcatgattggctgtttcaataaatccaaaattatccttcagagttgccacataacccaagagcctcttggagttagaattacgacctaaaagtcgcacacaagttgcaacctgctgtccaggcctctgtttgtcactaatactaaattcaaccttatctcctatttgaggagaagtagatccttccacatccttggcttgaaaagcaatagtcagtttcaccccacagtcatcataagcaataatgccatcctcagcctccttctctttgcctttatttgggctagtggttttaggattggaaaaagtggcttctttttctaccgtgcccagaaaacggtgatctgaatgggaatgaaatgaaaccgtgcccttgggaagttttttaatcctaatagcatgatttctttgagcagagagcatatcaggaaccacagtaaactctacttcatctgcaatatggagctggttcccatccagaatttcactgaagtggaagaacatacgaacatcacgatccacacacttgatgaaaccaaaaccatctctcatggcagcaatcacacccatttctcgggcttcattagtgaactgaaatgtatttgacagaacttctatattggttgctcgctctaatttgtcacgtcggtctgttgaaatattaaacctaacatggtcaccttccagcagggtcaccttggatttcggtatctttgtctccaaagggaagttctttagggatcacaaagtcaactttgatgcgtcctggcaatgggtcattctggtttttactgggtacttttgggataactttggttacagttccttcaaaatgttcaatgctgatatcttcaaaaanggactgttccttgaggcaaatagnctgacatctgttgcaacttntttnaccatntctgtccgtgattgtngaattccacatcatcgccaggctgtaaggtttctaagtcacccttaaattcactatagtgaaagaatatctcttttacaacatcacctctttcaataaagccaatgcctccttcatggcacaaactactccctgacagcgggcttgtttctttttcaacagtataatgttgcgagcacttacagcaccagtatgtttattgttatcaattacaaagtttattttatctccagtttccagctgaacgttcccttcgacatcttcaggggtgtaagtcagataaaacaagaaatcctccctgaagaacgaatgaatggacaagaagtgttttatctgacttacacccctgaagatgtcgaagggaacgttcagctggaaactggagataaaataaactttgtaattgataacaataaacatactggtgctgtaagtgctcgcaacattatgctgttgaaaaagaaacaagcccgctgtcagggagtagtttgtgccatgaaggaggcatttggctttattgaaagaggtgatgttgtaaaagagatattctttcactatagtgaatttaagggtgacttagaaaccttacagcctggcgatgatgtggaattcacaatcaaggacagaaatggtaaagaagttgcaacagatgtcagactattgcctcaaggaacagtcatttttgaagatatcagcattgaacattttgaaggaactgtaaccaaagttatcccaaaagtacccagtaaaaaccagaatgacccattgccaggacgcatcaaagttgactttgtgatccctaaagaacttccctttggagacaaagatacgaaatccaaggtgaccctgctggaaggtgaccatgttaggtttaatatttcaacagaccgacgtgacaaattagagcgagcaaccaatatagaagttctgtcaaatacatttcagttcactaatgaagcccgagaaatgggtgtgattgctgccatgagagatggttttggtttcatcaagtgtgtggatcgtgatgttcgtatgttcttccacttcagtgaaattctggatgggaaccagctccatattgcagatgaagtagagtttactgtggttcctgatatgctctctgctcaaagaaatcatgctattaggattaaaaaacttcccaagggcacggtttcatttcattcccattcagatcaccgttttctgggcacggtagaaaaagaagccactttttccaatcctaaaaccactagcccaaataaaggcaaagagaaggaggctgaggatggcattattgcttatgatgactgtggggtgaaactgactattgcttttcaagccaaggatgtggaaggatctacttctcctcaaataggagataaggttgaatttagtattagtgacaaacagaggcctggacagcaggttgcaacttgtgtgcgacttttaggtcgtaattctaactccaagaggctcttgggttatgtggcaactctgaaggataattttggatttattgaaacagccaatcatgataaggaaatctttttccattacagtgagttctctggtgatgttgatagcctggaactgggggacatggtcgagtatagcttgtccaaaggcaaaggcaacaaagtcagtgcagaaaaagtgaacaaaacacactcagtgaatggcattactgaggaagctgatcccaccatttactctggcaaagtaattcgccccctgaggagtgttgatccaacacagactgagtaccaaggaatgattgagattgtggaggagggcgatatgaaaggtgaggtctatccatttggcatcgttgggatggccaacaaaggggattgcctgcagaaaggggagagcgtcaagttccaattgtgtgtcctgggccaaaatgcacaaactatggcttacaacatcacacccctgcgcagggccacagtggaatgtgtgaaagatcagtttggcttcattaactatgaagtaggagatagcaagaagctctttttccatgtgaaagaagttcaggatggcattgagctacaggcaggagatgaggtggagttctcagtgattcttaatcagcgcaactggcaaagtgcagcgcctgtaatgtttggcgaagtctgtgaagggcccccaaggctgttgcaagctccctcgacctgaatcggttgggtcaatcgcttgaagaatatcacctctggatgatgccagtgctcctcggcctaatggttccttcgtcagcccaagggggaccagataactcaatggggtttggtgcagaaagaaagatccgtcaagctggtgtcattgactaaccacatccacaaagcacaccattaatccactatgatcaagttggggggaatctggtgaagggttctgaatatctccctcttcatccctcccgaaatctggaatacttattctattgagctattacaccagttttaacaccttcctcatgttatgtttaaaaaaataaataaatttaagaaaaccattttaaataatgcacagttgcagcctggaaaaacttaaggtggcgccttatagtatcaattttaggagctttatttggtgcatttaacgcaactggtaattgcagaatccactttgcctgtgtaagtgaaaaatatagactgttatcttgttggccctatgaaattctgcacttttcattatatactctaccttcattaattacttctggcaagatgttctgccttagcactcagttgtattcttttcctttttcttcctgttcattatgctttaattctgaggaccatatgagggtagaatatattatcttttaaaaattacaaaaatttgtataggcaaaccatttcttaaagttgatgggccaaattttaaaatgttatttttcatatcatttataatcttgtcacaatccacttaaagaagtttggttatatttcagtgaaaattttcttccagagtaggttttttttcgtgggttgggggggtaactttactacaattaggtaagtatggtgcagaatttcatgcaaatgaggagtgccagcagtgtgataatttaaacatatttaaacaaaaacaaaaaaatgaatgcacaaacttgctgctgcttagatcactgcagcttctaggacccggtttcttttactgattt

SEQ ID NO: 523 - DNA, 2828 bp, Homo sapiens
ctcatttgtacttagacaaagaggcagctgaacgtctttcaaaaacagtagatgaagcatgtctgttactagcagaatataacgggcgcctggcagcagaactggaggaccgtcgccagctggctcggatgttggtggagtatacccagaatcagaaagatgttttgtcggagaaggagaaaaaactagaggaatacaaacagaagcttgcacgagtaacccaggtccgcaaggaactgaaatcccatattcagagcttgccagacctctcactgctgcccaacgtcacagggggcttagcccccctgccctctgctggggacctgttttcaactgactaggatgggtgtcatgtcccagatttctgtttgtaccagcagaaagaagagggcaagtcatggttggaaataaccttctagcccctggttctatcccttcttccgcccagccccccagcctcaagaaagaacctcagactctgattctcctcttcagcctctcatcttgagcacagttcagaacagtggcgactggaatctggtttatattcatatttgcaaagactacagactttttctcccacttcatattttcatgcccccctgttggttttccattcttaactgtctccttatacctaagaagttatgaaaatcatgtgtacttctggaagctttcgaaagaatcttgtccctcatgacagcattttatcatgaaagcagcttctcctttctgggctgggcttgttcaagttcggtgtgggcttccactaaggcacttgtcctggagacgttggctttcccagctgcatctgccccaaaaggttgtaggcacagctgtcgtagcgttgccataaagagtttgccaaatctctgatcctccctttccattgcttctcctagtgatgcacgaagattaggtgcatttattttgtaaacagattggagaatctagcaataagattcaaagctaatctggagcataaaggcacagttcagagacagaataacagggatcacaagcatgaattaaaaggaatttatttgcttcaagttcctagatacaaccttcccatgctgcacttctccactgtcggagcacgttccgaaaaacagaatgccttgatccctggtgggtgcgaaggcagttgttagggatggcaggcattggtgggctccaaaagatgaaggccccacacacaggtgtgctgcatttgggatctgtgtgggtgtttcttggaccctttcttctgggagtagggtacacactaacgtttaatccgctgtctgggtgcatgtccacagtacggtggctaaactcgaacatcactgcaaataggacgctgagcaggtccgtctgtcatgtcacgccactgcacaggtccttgtccccacacgacggggagtacttgcgtcagatgttattgaatagctcgtctcgggcaggggaagcggggagttggggatattaattgggggttttaattctattatcatgtcagctgacattatgactatataatgtagttagagacaatttttatcttgcttatagtaaaggttcagcctgccaattgtaaatcattctaatttggcaggcttatttttgacattggaaagggcagaaagcgatttgccccagtagtgtaataggagttatagaccagaggctgaaacccaaactatataaaaaggaattcagtggagggggctttgtaatctccattaatttgtgttgctacttccaggatcaccaaaaattacatgtaattttacatgttaaacacattgaaacataacctatgtttataaagcataacgggcttcccttccagaagctctcctgcttgtcatgaagtgagaacaatgaaaagtcatagcagatactcagtttaactctgtgtagaacctagtagtgtttgagctgttattcagatttgaattcagactgtgtgttgtttgcttatggacactgcctgtcgttctgtcactgttaaattaatgagtctataaggtttttcttccagaggccataggtgacatcactaaaattgcaagataaattgtaatctttgctgctgctgcactccccaacctctcccccaccccccgtggtgtgctgctttctagatgagcgtgttttggagcaggcccatctgggacactctatgctttcaccaaggaagtgcgatctgagcagccacaatccagccaaaagaggatcgtagatatttgctctgatcaactagatgaaaatatagcagaatggatttagcccactgctctgttttatccaactgagtctctgaccagcaattggtgcataattattacagcaaaagttaagaaatgaaactgtagcaattatgtaaatgaatgtgttggcctcttaatacctgttactagtggacttcctgtgaggaagttagttttttgttttgatgaaatgctttcgttttttaaatcttaattctgctgtccacatcctcccaaagtgtgcttacttcatttgtttaatttaaatgaactttcctccttgtatgtatgaggtgacttggtgggtggggtgggtggtttttgtttttgtgttttttctttcttagggcatctgtaggcctcaaaggacctttcctttaggtcatattcctcagaaagtcttcaatcttcccttgtttttgtttgtttgtttttcttaaagaatattttcaaagcttaaatttgtatattaatttaggactatttagaagtataggctgtcgttggcggcagcagtatattctgaaatgtctcatagatatatatttttgaataaagatggtgttgttgaac

SEQ ID NO: 524 - DNA, 455 bp, Homo sapiens
  modified_base (4): a, t, c, g, other or unknown
gcgnccgagtggcgtcctggagccctcctcagtgctgaagctgctgaaagatggcagaagaagtggtggtagtagccaaatttgattatgtggcccaacaagaacaagagttggacatcaagaagaatgagagattatggcttctggatgattctaagtcctggtggcgagttcgaaattccatgaataaaacaggttttgtgccttctaactatgtggaaaggaaaaacagtgctcggaaagcatctattgtgaaaaacctaaaggataccttaggcattggaaaagtgaaaagaaaacctagtgtgccagattctgcatctcctgctgatgatagttttgtttgacccaggggaacgtctctatggacctcaacatgcccgctttatgtgaaatttaacttacatggctgagagagaggatgaattatcatttgataaagggggacaaaggtt

SEQ ID NO: 525 - DNA, 3875 bp, Homo sapiens
gcccccgcccggcccgccccgctctcctagtcccttgcaacctggcgctgcatccgggccactgtcccaggtcccaggtcccggcccggagctatggagcggcgctggcccctggggctagggctggtgctgctgctctgcgccccgctgcccccgggggcgcgcgccaaggaagttactctgatggacacaagcaaggcacagggagagctgggctggctgctggatcccccaaaagatgggtggagtgaacagcaacagatactgaatgggacacccctgtacatgtaccaggactgcccaatgcaaggacgcagagacactgaccactggcttcgctccaattggatctaccgcggggaggaggcttcccgcgtccacgtggagctgcagttcaccgtgcgggactgcaagagtttccctgggggagccgggcctctgggctgcaaggagaccttcaaccttctgtacatggagagtgaccaggatgtgggcattcagctccgacggcccttgttccagaaggtaaccacggtggctgcagaccagagcttcaccattcgagaccttgcgtctggctccgtgaagctgaatgtggagcgctgctctctgggccgcctgacccgccgtggcctctacctcgctttccacaacccgggtgcctgtgtggccctggtgtctgtccgggtcttctaccagcgctgtcctgagaccctgaatggcttggcccaattcccagacactctgcctggccccgctgggttggtggaagtggcggggacctgcttgccccacgcgcgggccagccccaggccctcaggtgcaccccgcatgcactgcagccctgatggcgagtggctggtgcctgtaggacggtgccactgtgagcctggctatgaggaaggtggcagtggcgaagcatgtgttgcctgccctagcggctcctaccggatggacatggacacaccccattgtctcacgtgcccccagcagagcactgctgagtctgagggggccaccatctgtacctgtgagagcggccattacagagctcccggggagggcccccaggtggcatgcacaggtcccccctcggccccccgaaacctgagcttctctgcctcagggactcagctctccctgcgttgggaacccccagcagatacggggggacgccaggatgtcagatacagtgtgaggtgttcccagtgtcagggcacagcacaggacggggggccctgccagccctgtggggtgggcgtgcacttctcgccgggggcccgggcgctcaccacacctgcagtgcatgtcaatggccttgaaccttatgccaactacacctttaatgtggaagcccaaaatggagtgtcagggctgggcagctctggccatgccagcacctcagtcagcatcagcatggggcatgcagagtcactgtcaggcctgtctctgagactggtgaagaaagaaccgaggcaactagagctgacctgggcggggtcccggccccgaagccctggggcgaacctgacctatgagctgcacgtgctgaaccaggatgaagaacggtaccagatggttctagaacccagggtcttgctgacagagctgcagcctgacaccacatacatcgtcagagtccgaatgctgaccccactgggtcctggccctttctcccctgatcatgagtttcggaccagcccaccagtgtccaggggcctgactggaggagagattgtagccgtcatctttgggctgctgcttggtgcagccttgctgcttgggattctcgttttccggtccaggagagcccagcggcagaggcagcagaggcagcgtgaccgcgccaccgatgtggatcgagaggacaagctgtggctgaagccttatgtggtacctccaggcatacgaggaccctgcacagggagccttggactttacccggaggctggtctaattttccttcccgggagcttgatccagcgtggctgatggtggacactgtcataggagaaggagagtttggggaagtgtatcgagggaccctgaggctccccagccaggactgcaagactgtggccattaagaccttaaaagacacatccccaggtggccagtggtggaacttccttcgagaggcaactatcatgggccagtttagccacccgcatattctgcatctggaaggcgtcgtcacaaagcgaaagccgatcatgatcatcacagaatttatggagaatggagccctggatgccttcctgagggagcgggaggaccagctggtccctgggcagctagtggccatgctgcagggcatagcatctggcatgaactacctcagtaatcacaattatgtccaccgggacctggctgccagaaacatcttggtgaatcaaaacctgtgctgcaaggtgtctgactttggcctgactcgcctcctggatgactttgatggcacatacgaaacccagggaggaaagatccctatccgttggacagcccctgaagccattgcccatcggatcttcaccacagccagcgatgtgtggagctttgggattgtgatgtgggaggtgctgagctttggggacaagccttatggggagatgagcaatcaggaggttatgaagagcattgaggatgggtaccggttgccccctcctgtggactgccctgcccctctgtatgagctcatgaagaactgctgggcatatgaccgtgcccgccggccacacttccagaagcttcaggcacatctggagcaactgcttgccaacccccactccctgcggaccattgccaactttgaccccagggtgactcttcgcctgcccagcctgagtggctcagatgggatcccgtatcgaaccgtctctgagtggctcgagtccatacgcatgaaacgctacatcctgcacttccactcggctgggctggacaccatggagtgtgtgctggagctgaccgctgaggacctgacgcagatgggaatcacactgcccgggcaccagaagcgcattctttgcagtattcagggattcaaggactgatccctcctctcaccccatgcccagtcagggtgcaaggagcaaggacggggccaaggtcgctcatggtcactccctgcgccccttcccacaacctgccagactaggctatcggtgctgcttctgcccactttcaggagaaccctgctctgcaccccagaaaacctctttgttttaaaagggaggtgggggtagaagtaaaaggatgatcatgggagggagctgaggggttaatatatatacatacattacacatatatatatttttgtaaataaacaggaactgattttctgcctccatcccacccatgagggctgcaggcactacaaaagagctgactactgagaattctggaaaacaaggtctgggctctagcagtgtggcacttccgacagagcacgtgaccgtccagggggaagcagccattgtcatctgcctcaatcgacaggggcttcccgcagtcctgggaagaaggaagggtgaggggcactggaccggaaggcccctgctctgctccaccctaccccaccccatccagctccatcttggaattagaaagatgcttcatggctcagagctggtgtcatcgctttttccagccacacccaactccccatccctatcctacttccagtcacccactaggaccttcctgcaagagggcaagcagtgggtagagctgctcccaaggtgcttgctcccctgcccaccaccaccctaataaaatagaggttggctcacctccattcgaagacctcttctctcagctcctgtttccccatcccctaccacggtaaaacaccatgcccttcttctctcctattggc

SEQ ID NO: 526 - DNA, 915 bp, Homo sapiens
cttctgagctttcttcctcaccagtgggctgtgcttgttccatttctgtacacccttattttataccgtttttcttcaacaatggcgaaattgactgtagtgctgaaccaaaagtatccctttccctccttattcctcaccccaagaacattctagatcacatgggtgcttgtgccttccgattttcttgcatttgtttttttcctgacctgaagttgttgttacaaaatcagtcagactttgtgggctgaaggacacggtgcagcagagggtgtccctgtgagagttctgcagagtgctgggcatgtgcctggaactaccgagtaggagccatttctttgtacccctgcctaatccattcctctccttccaagtccattgttgcaagcaatattcttctcaatttttatatgtttactttaaatcaaagttagtctatttgtataaaatttttaaaaaatctaaaagaaaaagaaaaaaaacaagggtgggttgggtattccagtgggaagatcattgaagggaaaaaatgttactatttactgaggtatttttcaccagaatgattgaattaaaaaaatcaattgcattttcattgtgggtgcttagagaagttctacaaaattcacacctggcaaggttatgcttcatttaattatggacccatacttttcaatttctgaagataccggaattccttatgaatcaaaagaaatttttcattccagtcaacgcacgcggcggactcgcgaattccaaacgggatctgctgagacctcacagaggtgggccgcgattataaggacgggatgacatatcttgagccacgacaggtctcgaggcccccagtacgagacacggagcagggctgtgacaccccacgcaggcaagagcgctaggatgcacagcacaccc

SEQ ID NO: 527 - DNA, 7093 bp, Homo sapiens
ggatttggagcggccggggaggcgggggtggccggggccggcttggaggcctggcgccacccttcggggcctgcaaggacccagttgggggggcaggagggggccggaggatggttggttgtgggatttctactttgccttttcctccttatgccgccttagtgaggggcgggagctctggcggcagccccggggtggggagacgagctccggagtcggaagagctgggttttcttccgggcctagccaccagttggcggagtgaccttaggcgagtcactctgtaatttgtctgcgcctcagtttcctcctctgcctatcaatgtgtgtggggttgaaatcgctttgtaaactataaagcgtgggtgtacgtaaaggatggttattgtttataattttttttgagttgtaagaaaacttagcagttccccaatccttgggttttgaacctgggaaccttggattggagttggggatccccaaacttcctgaaattgtgggaatgtgcggtttgggggaatgatgggaatttgtgggaatgtgcgttttaggggaatgatgatccatcgctagcaagttttccaagggggctgtgacccagaagagttaagaatcacaatttcttcatgctacagagaggaaactgaggcctagatgtcatttgggacccttcacaaccattttgaagccctgtttgagtccctgggatatgtgagctgtttctatgcataatggatattcggggttaacaacagtcccctgcttggcttctattctgaatccttttctttcaccatggggtgcctgaagggtggctgatgcatatggtacaatggcacccagtgtaaagcagctacaattaggagtggatgtgttctgtagcatcctatttaaataagcctattttatcctttggcccgtcaactctgttatctgctgcttgtactggtgcctgtacttttctgactctcattgaccatattccacgaccatggttgtcatccattacttgatcctactttacatgtctagtctgtgtggttggtggtgaataggcttctttttacatggtgctgccagcccagctaattaatggtgcacgtggacttttagcaagcgggctcactggaagagactgaacctggcatggaattcctgaagatgtttggggtttttttctttcttaatcgaaagttaacattgtctgaaaagttttgttagaactactgcggaacctcaaaatcagtagatttggaagtgattcaaagctaaactttttccttggccctccttgtgttctaattgcttgcaagtgtaatactaggatgtccaagatgccagtttttgcttctttgttagttgtcagctgcttttatcaaatttcaggccattatccaacaaacactataaaaatgtttgaacaattggatttcaaacattttcgttttgtggagtggtgctcaccaagtggtacagccctaagcaagtgaacacaaacacatttaagtgtattttgtctgattagatgttagccagttatgctatttcattcaaatgtctgaaaaaatcaattgactattcccttttcctaaagggcagagacagataatctcacttccagagaaatgacttggagaaaaaaaagtgttggtctttttgctcttttgtaattaaatccggatgtacctcaaaagacttaagactgtggtgataagatgctttcctcagcagaaaggagggaaaaaaaacaactggaactcaaagcttgaaattctgtggcaaaacatgagatgtccaggattggaggttgaaaagatttcactacagtgttctgcaatagttggagcagataactttcagtgtagccacagccatggactccagatttccagattttcaagacctggacctggaacccgaaagagcttgtcacgatgcggcaggaacactggaggtagatttttttttatttttgaattttgggactgttgaccttgctgtgagaaaagagacaacgactgagcaagcactaccaccagcactgttactgggaattagaagacctgagtttctgtccagaccctcagtgcaaactgaggatgctccatccaaagtgaattatgtcctgtgcctcctgattgctgagtgttcacctggaccttctgactaccttccctgtgctattccatcagcctacagacctggtacctggatttttgcccgagatgattcctaccaccttactactgacgaagacacccattccagtggaccactgtgacccaggaggcattcagccatcatgatgtggcctttacctccactcctgtcttgttctacccagattcagcacagccctttatagtgaagtcagagtcctcaagccaaatagctaaagctgttttatcacaacaaaggcctagtttgttccatgagtgtgcatttcatttcttcagttaaagccttcagagacacacaataaatttggaccaggggattttttagttattaatgctctctgaagaaaggcaacatctttttgagagcagcattggaccacaccccacaatctcaaatgattgaaattcatgaacatctaggatcccgtgaaggtcactggaccctgttttttctacttcaaatcctgtagtagcctactgaatgagaaaacatattctgacccattgggatcaaatcaaaggcacagtgaactcctcatagcatcttctttggaattactcaggaaccagaactttttacacaaatgtaagaaattctaccaaggagtccccttacctaacagcatctcacaaggctgcaccagattccagaaaaggcttctcttgatacatcaaggtagaacctctatgcattttgtgaccgacttattcttagatcattggttttccaaaggctttgtggccatgaagccctttgagtgaaaactgtgcagaagcccagagtaaaagtgaagctgctctggatgaagtagtgaagcaagagtaggggcctgaatcctgctacaactatcttcctttaccaccgtggtgacacctaaggggacttccttacaacaccttgaactcttccgaacacagtttgaaaaccactgccccagacagcaatatgtttgacctgaatggcattccaatcttttctgtacctccactcagcacagttcatgttcagtagatgctgaacattcttagaaatactgtgtgtgaacttagaaaagtgcaagaagacaggcatgtctttgaccccaggaatgatcatttgctgaagatggtgtcaagtgaacctagattaacagccctccactccagatggatatccagtgattcctagaatgggatatagccagagaacaattctatgcaccctacactgacagactcccttaagcaacaccagatgctctactggtacttgaagtacatgactttgaagtcttgaccctccatgaatacctgaattatcagcaagcgggttttgaagctggtgcctcattgaggccatattagagcaacttgtacatttgacctcttgttatcagccatggtactctacttcgtgtgcaagagataactatgaaagccaaattcaaatactggcaacatttcctaaaggggctcaatatcttatcattcgtcttcttttccaaactacacatcactgtatgactcaaccagtagcagttatattgccccttggtttttattcagtttaactactgtttccaagataaatgagctaataagctttaaaaaaaaaaaaaaaaaggctgaattcttttttcttcatcactggcatatctgcctattctccagaattattatgactattcagctcactttaacagttgaacttcaagcgacaatctttgaacaccccttctcatgtgatttaaaatgaaaccatttggaaaagtttcttctagccagtaatagattttttttttaattgctctgccttgtgccgagagatgttcttttaagatgaatcttttgatgtctgataccaccaaatataggtggtagggagagttggaggctggccctttgagcaggccattagcttacttgctgggcatttccgatagcttattgcctacctttttgctggaaacaaactgatttgaaaaacaaaatctatgaagactgcagctaaggattttatcggtagacttaagagcttttgtccttgtggatattttagtggaaccacatcagtctcaatactgtcattttacactgactcagagcagctgacttcattccttgccatgatatatatttaaggcaggcattgtaacagacataaagacaacttatctgtttcagcaggaaggattcagtttatgaactctcagaccagatcatgttgaacaaggagactttgatgtgtgtcatgagaaaactcattctttacttcccagtcaatttaaaggccagctatcctgagctactcgaatgaatgcactggttaaacattggaaatagtttgtttatatccttgtctctctctaggccaattgtgattacatgactcgactctacatctcgtcaaacaaggcctaggtctggttgctgtagactgctcgccctcaacaaataaaatctggttgactagcctccttgtatatacaactattatttgttaagaagaaattatcgtcaattttctactaccttccaattgtcagctctttttttcctctctggtttttcctatactttacagaaaaagacattgatctatactgccattccctctaatcctgccatactcagtcaaaaggaatgacttaagatgaagatgatcatctgctcgagtctaaaatatacattgtatataagaattggtgattagaaaagcaaaaaacctaaaacttaaatctaggagtctgtatactgtctccatgtctccatgcctcagatctcatctaaatctttgaacagcaccattcaaccaatctgaggccttgacttgcttgtaagatgattctcagagatcggctgagttaaaaaagatgacgacttgattaccaaagaaagtagggccaactttgacaaatctggctctgctgaccctgtcactcccagatgtagcatagactcctaaacagaacctcaagtctgattgaggataaggccttctcctgagctgaaagttctttggcagatgagcaagaaactgaaagctgatgtacctgactggctctgtaagatcagaaaactgtatccagaataagccctatggattaacccctgagtacccagagtaaaaactaatttacagaacttccttattgatctgctggttcttccagatcatattctggctattggtatggctggcctttctgaaggtaccctgcttgtctattttcctgactcagctcttgcctgcctttttcacatgttgctgcaattagactcaccgtgaggactacagtcaatttcagtctatcttgtgcccaatacaacaaggatttttaatagtaacaacccacacctcacccactaggactcaatgttcacaacaggaaggaccattgctgcatactccttgaccagcaacttttttgaagatatttttaagtgcagagtaggcctctattcctgtatgtaattgttcattttcagcacctggaacctcatctatcgggtctggaaggaatacagcagttcgaaagccgcgtccatttctctccttcagtagtgcagaaatgagtccgattcaccagtacacacagaactgtaccagttcaacctagcaaaagaagaaaagtttccactgtacttaaaatttacagctgactcaaattgcctcacagaattatttgatgtagaaggctagttgtcttacttcagatcagcaggacagttgggctctcagactcatgaccactgagtttgcttgtgttgaaactgtggtttcatccaacatatgctattggacatgattattattccattcaaatggattacagacttcttgaggacaggacaaacttatctctcatggtgtttttttagaatacttttataaccaaggaagaaaccatgccagctgttaccattcaacttcttaagcagagattaagctttttcatatctgttcttatcctggacatcagtagtttttaattgcccagcatccgttccatcttgtaacaactccctgatgtttcttaaaaccacctcttcctattttcagtctgtggtttggacagtctgacccaaccttgagctttgtgggtgaacatgtaattcagacctcatcaatcagcaaatccatctgaactgtggaggagaagctctctttactgagggtgctttagctttgtaggatgaaaacctcaaactaacagggcctaccatgtagagaatgaagccagtgcaggggaaagcagagccaaaatatggagagacttgaatcctgatgacagcgtttgtgcccctggatccaaccgtgcctgaagctagaatatcccctggacttttcagttatgtgaaccaataaatacccttttttgcttaagttactttgagttgggtttctgttacttgaaattgaatccacactaatatatctaccaacattgagacttgacagatccaagtatttattaagctagaggtcatggtcactgaaattactttccaaagtggaagacaaaatgaaacaggaactgagggaatatttaagatcccacagaagcgtaaaaatgacatggtagaaagtaatagaaaacctaaatgtctgtcattaaaggataggttaaggtgtggttcagccatataggaatatctcgtatctgttaaaatgaataaagtacattcattgtgtatggaaaaatggccatgatacattaggtgaaacaagttattaatagaaaagtgtacagtgtgaactcattttaaaatgtgtgtgcttatgtttataaatgcatagaaaggtctattcacagctttctttgaacagtgtagatcacatgaaactttcaactttatacatttctgtattaatattttacactacccacattatttttaaactttattttaaataaagaatttttaaaatt

SEQ ID NO: 528 - DNA, 346 bp, Homo sapiens
  modified_base (37): a, t, c, g, other or unknown
  modified_base (242): a, t, c, g, other or unknown
  modified_base (287): a, t, c, g, other or unknown
  modified_base (312): a, t, c, g, other or unknown
aagatcacaaggtttacatctggcacaaacgtagtanacctgccaattgcggactcaggggcacacacgtacagtaaactgtgtgagctggaacccacagattccatccatgatggccagcgcctcagatgatggcactgttagaatatggggaccagcaccttttataggaccaccagaatattggaagagggaatgcagtagcatgggatagtttgatgggtgatttgggagcagacganttcttgttttaactttaaatttagttcgtatttttaattggcttnggggttttgggtgccaaaccaaacntgatttgatagcttgggacaggacatgcttccgt

SEQ ID NO: 529 - DNA, 4401 bp, Homo sapiens
cggcccccacctctgcctccttctactcgggcgccccggccgccgccacctctccccagcccaggagaggctgcggagccgcagccgcccagaccgcgcagcgcggggaggcaggttccgcacgaaataaatcagaatgagttatgcagaaaaacccgatgaaatcacgaaagatgagtggatggaaaagctcaataacttgcatgtccagagagcagacatgaaccgcctcatcatgaactacctggtcacagagggctttaaggaagcagcggagaagtttcgaatggaatctggaatcgaacctagtgtggatctggaaacacttgatgaacgaatcaagatccgggagatgatactgaaaggtcagattcaggaggccatcgccttgatcaacagcctccacccagagctcttggacacaaaccggtatctttacttccatttgcagcaacagcatttgatcgagctgatccgccagcgggagacagaggcggcgctggagtttgcacagactcagctggcggagcagggcgaggagagccgagagtgcctcacagagatggagcgtaccctggcactgctggcctttgacagtcccgaggagtcgcccttcggagacctcctccacaccatgcagaggcagaaggtgtggagtgaagttaaccaagctgtgctagattatgaaaatcgcgagtcaacacccaaactggcaaaattactgaaactactactttgggctcagaacgagctggaccagaagaaagtaaaatatcccaaaatgacagacctcagcaagggtgtgattgaggagcccaagtagcgcctgcgcttgcgtggtggatccaacaccagccctgcgtcgtgggacttgcctcagatcagcctgcgactgcaagattcttactgcagtagagaactctttttctcccttgtactttttttttgacctggcatctttttatagggaaaaatggcctttgtaggcagtggaaaacttgcaaggaaagctgccgtctctttggcagtctgatgcagagcctgcactctggcactcgctgaagaatctggaaggttgcggtttgctcttccagtgttcgggggcctctggctgctgaaggattcggtctaccacggagggctgtgctgttaggctgcatcccactcaaaatacaggaaaagcacgaatcatgattctgctttctgttagcttaggcagacattgggccttcacctacaagtttttccttacccctgtggtttttgtgttttttttttttctttttccataggaaagaatatataaatttgtaaatcctaattcaaagatggctcgtgtgtgagggcattgagtttgatttgttttccctttggtctgggttgtgtggcttttgggggatgcgtgtgagggggctatgtgttttttaattttttaaatatatattttggtgctgtgtgtggtaagagacttgttcctagtggatcaatgaaccatctcttctgggcagttttgttgaaaataaaggtttctctttgatttcaagaatgaccaaaatggcctctaaaagatgttaatcatctcaaatgaccttttgtctttggggcgttcttccccctgtgatagcggcagtggctttttctggtacctgcagctggaaaggccacttggccctgtgctgagtgagcggccttcattagagcgaggcagcccttggccggtggggacgcagagccccagcaggtggtgcacgactgttggcggaaggaacgcgtgttcatcctcagtgatctgccctccagcatctcggcagcatctcatcctccatcgtcagctggctctgccgatgtcctgcttctgttcactcacagaactgtcccctgctccgtggtgggcaggagggaagtggtgcagggctgcgtgcattgcctgcgagtcgggacagttgatgggcacatggccttgtagctctgggcacagatgtgtttggattcattgcagcggaccaccgggcactgttgaccccactgagcagtgctaagtgttggtttagtggatgttcgtggaattgctgacccatccaagggcgtcctttggagccagtggagcctgccggcgcatctgaggggcagaatgctgctagcacttgaatctgggatctcgccttattctcaagtagcaaggcatctcgacaagcatggtctaggtctggtggccagcttgccagtacctgagccggtcgggtcatctgcctctgagggaccgtcctcaccgagctcctgcatcccttgagtgttgatcaggaggcgtccacagcattgttctcgcctctgaatgatgcttctttctgtgttggagcctggcgaagttgtgttttcaagccctctacttctctttccagtgggtaggagcttttggcagtgtttactttacctagatggcttatataatccagtaagagatgcaaagataaaattgctgcggttgttacagaagcatggcggcctccagactgacccattggttgccctttagattttgtaaggatgcggtgctggggaggtggtgcttccctaccacctagaaatgctgccttccaactaccactctcccagatgtgacccttgcgattatttcctctgaggtttgaggatgaagataagttggagggaaagagagtaactaataggggatgaaatatagcagaagctagaagaaagcggtgaggtgagagagatgcatctgcacgttttcttcaacagcaccaggtgattcagcatattcctaattacctttcactattcgtgtatataagatcgtttacttgcataatatatcatcaatttgacatattcttaaaactagagggtgtgagaagcacagcaataggaagtctctccacaaactaggggaacacaaatggggtcattcacgtgcctggactgtcactatgtggctgtcacgtgaagtgctggtgttgatttccatttcagccagtgggtagctgataagccagtgccagcatccagcatgagcagatgtcggggagactgggaagtctccagcgttactgctctccttcccttcatgataagccagtgccagcatccagcgtgagcagacgtcggggagactgggaagtctccgatgttactgcctgccttcctttcgtgtgaggggctgcacttgcttttcttgtgatctgttagtggacgaggtcttccaaggaagtgctttgcacactttctttgctcctttttacagtctttgtctttgcagcaagcaaatgaaattaagccactttgggataatgaacattcagtataattctactttgtctcattttggatctcactgttgtctttataaaaatggcacattttacaaagtagtttattcttattatactttctgctggagagtgccttgaaataaaatgtgagagtattctggtactctgtgttccagatgcatgaaattgggtgaggaataacccctagtctggaatctttgtgaagcatagggttattgcaaggcaaatgggaactaacacatcttgccatttgaatcagggtctccagtttctagaaaaggcagacactggttgggaccaaagtctccatggcacatgactgaagactggtggtcgtgtgtgtgcggagtccacggaagcctcggggaggtggagctgctccttccattccgtcaggacgtgatctgaaaacatgtagagaagatgagttgaggacagcttttctaaggcaatgtgatgtctttgctttcttatttctctttctctgcgttgttagttttgaagagtggaggagctaggggctccagaaagaatcttacacatgtgttgaagacattgatgtcatagggagcggggagctgcattcccttctgggctgttactgctaaatctcagtatgaacagaccaggcggaaagcttggtggccaagcagtctgtgtgcttccccgctgatggagaacgttgcgttgttcacaatagggcctcatgggtgtagccgcatggcagacccatggctggcgcagctgcctgttgccgtctgtcttcagtaactgctgctctgttaactgttctattctgatactacgcgtgttgttttttacaacaggtatgtttttgtttcagaaatatgtattgcttttctcatattttttgcaaattgtattgtcaacatgggtcatttaaagtcctgtatgaaccataacctgctgtggtacctttgtacatgtttgattctgtattctttattccagtgtggcatatgtgcccctctgtatcttttgagaagtgcggaataggttgcttctaccacctgttcttaatgtaacagtaaaagttttcacatttttctcagaaaaaaaaaaaaaaggg

SEQ ID NO: 530 - DNA, 337 bp, Homo sapiens
  modified_base (2): a, t, c, g, other or unknown
  modified_base (5): a, t, c, g, other or unknown
  modified_base (265): a, t, c, g, other or unknown
  modified_base (275): a, t, c, g, other or unknown
  modified_base (323): a, t, c, g, other or unknown
tnttnactgtgccgttttagtggtttaggataaaaatgcacttgtgaagcaaatgtagtgccaacagaaggtgattttccagttgtaaatgtcatgcagcatttgaagggactgtgttttcttaaaaaaaaaaatcacagttacttctaaaccagatttcatttcttttattgttttatgtgccaaaccacgaaggccattggggctttcaatctctggaacactgtaggacccattaggaaggactgttcccgattgttacaantgtagtgccnggaaaacactctttaggctgatgtctttaaccaaaatggaaggttctnccaagggccaaaac

SEQ ID NO: 531 - DNA, 286 bp, Homo sapiens
  modified_base (88): a, t, c, g, other or unknown
gcaccgcactgccgcctcctgactgcccctatccccgcagcccctgtgccggatttcatttccctcctctctcccagggtacctggcncccagcactctcccatctgttcttcaggaaccgactcctctccagttgcaacaccaggggagaaaggggcctccacatgcccaagtacccctgcaggatgaagggcaggccggcccttgatgtgccatttctgaataatagtcactgccgccgagtctagggatgtcctgtttttaacttagccctgccttgggatgc

SEQ ID NO: 532 - DNA, 422 bp, Homo sapiens
  modified_base (144): a, t, c, g, other or unknown
  modified_base (184): a, t, c, g, other or unknown
  modified_base (189): a, t, c, g, other or unknown
  modified_base (200): a, t, c, g, other or unknown
  modified_base (238): a, t, c, g, other or unknown
  modified_base (261): a, t, c, g, other or unknown
  modified_base (359): a, t, c, g, other or unknown
  modified_base (372): a, t, c, g, other or unknown
  modified_base (395): a, t, c, g, other or unknown
  modified_base (402): a, t, c, g, other or unknown
tttttttttaaaggggtctcatttattgtcactgttccaaatgtacaaaaaaaattagaaaatacccccaactcaaccccacccccacaacatttcccccaacacaaataatttttcccaaaaccacaaacataaactggtccnggggatttccataaacagtgcagctaagaaacagtttagngaaantttaacagggnttcagattatatccattctgtcctctcgggccctgagngggtaataattcccatatggggncctaggtcctccccaatgggttttcccatctctgatggggaggaggtcctttttacaagtggggtgtttgggctactgctttaggggatcctcctggnggccttctttctncttctgggggtttttcttcttgnatttacnggggggggtttttaggcttc

SEQ ID NO: 533 - DNA, 614 bp, Homo sapiens
gccgcagtcttcgccaccagtgatgccgccctacaccgtggtctatttcccagttcgaggccgctgcgcggccctggcgcatgctgctggcagatcagggccagagctggaaggaggaggtggtgaccgtggagacgtggcaggagggctcactcaaagcctcctgcctatacgggcagctccccaagttccaggacggagacctcaccctgtaccagtccaataccatcctgcgtcacctgggccgcacccttgggctctatgggaaggaccagcaggaggcagccctggtggacatggtgaatgacggcgtggaggacctccgctgcaaatacatctccctcatctacaccaactatgaggcgggcaaggatgactatgtgaaggcactgcccgggcaactgaagccttttgagaccctgctgtcccagaaccagggaggcaagaccttcattgtgggagaccagatctccttcgctgactacaacctgctggacttgctgctgatccatgaggtcctagcccctggctgcctggatgcgttccccctgcccgcctcatagttggtgtagatgagggagatgtatttgcagcggaggtcctccacgccgtca

SEQ ID NO: 534 - DNA, 6754 bp, Homo sapiens
  modified_base (653)..(654): a, t, c, g, other or unknown
  modified_base (658): a, t, c, g, other or unknown
  modified_base (734)..(735): a, t, c, g, other or unknown
  modified_base (6709): a, t, c, g, other or unknown
caaactgaatcctgctttaattcaagcttgtggagaacaaagtcctacagaaacattccacagaattttctggaaaagagggatcacaacaaccctgtaaaaaggtgagaaggaagccaggacagcgcagtccccagtcccgaacggccagggagaggaggtggcctagcgctggcggggctcaccccaatccgtctgccttttgatgccgtactctgctggttggcgcagccacctcgggatactgcacacggagaggagggaaaataagcgaggcaccgccgcaccacgcgggagacctacggagacccacagcgcccgagccctggaagagcactactggatgtcagcggagaaatggctttgagctcagcctggcgctcggttctgcctctgtggctcctctggagcgctgcctgctcccgcgccgcgtccggggacgacaacgcttttccttttgacattgaagggagctcagcggttggcaggcaagacccgcctgagacgagcgaaccccgcgtggctctgggacgcctgccgcctgcggccgagaaatgcaatgctggattctttcacaccctgtcgggagaatgtgtgccctgcgactgtaatggcaattccaacgagtgtttggacggctcaggatactgtgnnagangggcttcatccgtccagcaagaactcagacaaatttaaccccagcctacaagcagccctgccagattgtttatggnntagtttcatggtagttggcactgccagcggaacacaacaggagagcactgtgaaaagtgtctggatggttatatcggagattccatcaggggagcaccccaattctgccagccgtgcccctgtcccctgccccacttggccaattttgcagaatcctgctataggaaaaatggagctgttcggtgcatttgtaacgaaaattatgctggacctaactgtgaaagatgtgctcccggttactatggaaaccccttactcattggaagcacctgtaagaaatgtgactgcagtggaaattcagatcccaacctgatctttgaagattgtgatgaagtcactggccagtgtaggaattgcttacgcaacaccaccggattcaagtgtgaacgttgcgctcctggctactatggggacgccaggatagccaagaactgtgcagtgtgcaactgcgggggaggcccatgtgacagtgtaaccggagaatgcttggaagaaggttttgaaccccctacaggctgtgataagtgcgtctgggacctgactgatgacctgcggttagcagcgctctccatcgaggaaggcaaatccggggtgctgagcgtatcctctggggccgccgctcataggcacgtgaatgaaatcaacgccaccatctacctcctcaaaacaaaattgtcagaaagagaaaaccaatacgccctaagaaagatacaaatcaacaatgctgagaacacgatgaaaagccttctgtctgacgtagaggaattagttgaaaaggaaaatcaagcctccagaaaaggacaacttgttcagaaggaaagcatggacaccattaaccacgcaagtcagctggtagagcaagcccatgatatgagggataaaatccaagagatcaacaacaagatgctctattatggggaagagcatgaacttagccccaaggaaatctctgagaagctggtgttggcccagaagatgcttgaagagattagaagccgtcaaccatttttcacccaacgggagctcgtggatgaggaggcagatgaggcttacgaactactgagccaggctgagagctggcagcggctgcacaatgagacccgcactctgtttcctgtcgtcctggagcagctggatgactacaatgctaagttgtcagatctccaggaagcacttgaccaggcccttaactatgtcagggatgccgaagacatgaacagggccacagcagccaggcagcgggaccatgagaaacaacaggaaagagtgagggaacaaatggaagtggtgaacatgtctctgagcacatctgcggactctctgacaacacctcgtctaactctttcagaacttgatgatataataaagaatgcgtcagggatttatgcagaaatagatggagccaaaagtgaactacaagtaaaactatctaacctaagtaacctcagccatgatttagtccaagaagctattgaccatgcacaggaccttcaacaagaagctaatgaattgagcaggaagttgcacagttcagatatgaacgggctggtacagaaggctttggatgcatcaaatgtctatgaaaatattgttaattatgttagtgaagccaatgaaacagcagaatttgctttgaacaccactgaccgaatttatgatgcggtgagtgggattgatactcaaatcatttaccataaagatgaaagtgagaacctcctcaatcaagccagagaactgcaagcaaaggcagagtctagcagtgatgaagcagtggctgacactagcaggcgtgtgggtggagccctagcaaggaaaagtgcccttaaaaccagactcagtgatgccgttaagcaactacaagcagcagagagaggggatgcccagcagcgcctggggcagtctagactgatcaccgaggaagccaacaggacgacgatggaggtgcagcaggccactgcccccatggccaacaatctaaccaactggtcacagaatcttcaacattttgactcttctgcttacaacactgcagtgaactctgctagggatgcagtaagaaatctgaccgaggttgtccctcagctcctggatcagcttcgtacggttgagcagaagcgacctgcaagcaacgtttctgccagcatccagaggatccgagagctcattgctcagaccagaagtgttgccagcaagatccaagtctccatgatgtttgatggccagtcagctgtggaagtgcactcgagaaccagtatggatgacttaaaggccttcacgtctctgagcctgtacatgaaaccccctgtgaagcggccggaactgaccgagactgcagatcagtttatcctgtacctcggaagcaaaaacgccaaaaaagagtatatgggtcttgcaatcaaaaatgataatctggtatacgtctataatttgggaactaaagatgtggagattcccctggactccaagcccgtcagttcctggcctgcttacttcagcattgtcaagattgaaagggtgggaaaacatggaaaggtgtttttaacagtcccgagtctaagtagcacagcagaggaaaagttcattaaaaagggggaattttcgggagatgactctctgctggacctggaccctgaggacacagtgttttatgttggtggagtgccttccaacttcaagctccctaccagcttaaacctgcctggctttgttggctgcctggaactggccactttgaataatgatgtgatcagcttgtacaactttaagcacatctataatatggacccctccacatcagtgccatgtgcccgagataagctggccttcactcagagtcgggctgccagttacttcttcgatggctccggttatgccgtggtgagagacatcacaaggagagggaaatttggtcaggtgactcgctttgacatagaagttcgaacaccagctgacaacggccttattctcctgatggtcaatggaagtatgtttttcagactggaaatgcgcaatggttacctacatgtgttctatgattttggattcagcagtggccctgtgcatcttgaagatacgttaaagaaagctcaaattaatgatgcaaaataccatgagatctcaatcatttaccacaatgataagaaaatgatcttggtagttgacagaaggcatgtcaagagcatggataatgaaaagatgaaaataccttttacagatatatacattggaggagctcctccagaaatcttacaatccagggccctcagagcacaccttcccctagatatcaacttcagaggatgcatgaagggcttccagttccaaaagaaggacttcaatttactggagcagacagaaaccctgggagttggttatggatgcccagaagactcacttatatctcgcagagcatatttcaatggacagagcttcattgcttcaattcagaaaatatctttctttgatggctttgaaggaggttttaatttccgaacattacaaccaaatgggttactattctattatgcttcagggtcagacgtgttctccatctcactggataatggtactgtcatcatggatgtaaagggaatcaaagttcagtcagtagataagcagtacaatgatgggctgtcccacttcgtcattagctctgtctcacccacaagatatgaactgatagtagataaaagcagagttgggagtaagaatcctaccaaagggaaaatagaacagacacaagcaagtgaaaagaagttttacttcggtggctcaccaatcagtgctcagtatgctaatttcactggctgcataagtaatgcctactttaccagggtggatagagatgtggaggttgaagatttccaacggtatactgaaaaggtccacacttctctttatgagtgtcccattgagtcttcaccattgtttctcctccataaaaaaggaaaaaatttatccaagcctaaagcaagtcagaataaaaagggagggaaaagtaaagatgcaccttcatgggatcctgttgctctgaaactcccagagcggaatactccaagaaactctcattgccacctttccaacagccctagagcaatagagcacgcctatcaatatggaggaacagccaacagccgccaagagtttgaacacttaaaaggagattttggtgccaaatctcagttttccattcgtctgagaactcgttcctcccatggcatgatcttctatgtctcagatcaagaagagaatgacttcatgactctatttttggcccatggccgcttggtttacatgtttaatgttggtcacaaaaaactgaagattagaagccaggagaaatacaatgatggcctgtggcatgatgtgatatttattcgagaaaggagcagtggccgactggtaattgatggtctccgagtcctagaagaaagtcttcctcctactgaagctacctggaaaatcaagggtcccatttatttgggaggtgtggctcctggaaaggctgtgaaaaatgttcagattaactccatctacagttttagtggctgtctcagcaatctccagctcaatggggcctccatcacctctgcttctcagacattcagtgtgaccccttgctttgaaggccccatggaaacaggaacttacttttcaacagaaggaggatacgtggttctagatgaatctttcaatattggattgaagtttgaaattgcatttgaagtccgtcccagaagcagttccggaaccctggtccacggccacagtgtcaatggggagtacctaaatgttcacatgaaaaatggacaggtcatagtgaaagtcaataatggcatcagagatttttccacctcagtaacacccaagcagagtctctgtgatggcagatggcacagaattacagttattagagattctaatgtggttcagttggatgtggactctgaagtgaaccatgtggttggacccctgaatccaaaaccaattgatcacagggagcctgtgtttgttggaggtgttccagaatctctactgacaccacgcttggcccccagcaaacccttcacaggctgcatacgccactttgtgattgatggacacccagtgagcttcagtaaagcagccctggtcagcggcgccgtaagcatcaactcctgtccagcagcctgacatgacagagcacagctgcccaaatacaaagttctttagagcactgaaagaaacacaaagccagccaggaggaacagtaactcttccttcgggtggaagctttcatcgagttgaacaggacttaaacgaatcatcagggaccggatatttcttatttctcatttggattcttaaccttgaatccaaagtgtctgcaatggacaacaattgaaggagtggcaaacttacttgtattgagagcacacgcaattcctactggtgaaattactgtttctgtttctaataaaatagaagggattccaaataaacacttgcacacatttttgaagtgcggctagattctcagattcacctttcttccagggaagataactttcaatctatataaaaatctctgtcctaaaactacctttctttattttgaagagacttactaacttacatataatctaaattagatgatagatttgtttttagcccttttgtttggtctatcagtataagaagaatattttaggtttatagctgaagttatcaaggtttaataaagtaaatttctaacagaatactagaaaaatgcagtataatttaattttttctaaataagaaacacaggaaatcaactactttttccccttccttatctccttaaaagaaaaataaaattgtacatgagaggaggcttctgtaggttattattaccattattgtgtgttctatgggaatcattgaggatatcacagcaaaaacagtaggacaaaatcataaaattcaatttaagagtacacaagtcctttataanagtttgctcctagcctggggcaacataatgagatcccatctctgc

SEQ ID NO: 535 - DNA, 2323 bp, Homo sapiens
  modified_base (539)..(562): a, t, c, g, other or unknown
agtcagccaccgaattgcttttatcagtgttaaagtggtctgaactgcttgctaccaatctgtgagaagtttttgtttttgttttgttttttaacttgcagtatatcacagagccactcttcaagtagattggctgggcaaaagaatgttttggcaagagcgttactgtagacctttctccctccttccttttactaccatttttttttaacactgtcatctgtaggtcactctccagcagttaggcaccttaactggagaccagaaaccttccagagaacacagggctgcatcccgagcaaccctctgaagaagggaattaggctttagattttgatagcaatgttccaggaatgaaatatagatgttagcccaagacaccatgacaaaatagcccagccttttgagagtaatttgggaaaagaagctgtcagaagtttctaacttacaaactggtttgaaatttttgatgcccagacagcaagtataaatcattttggaggcttacttttcatgatacaaaagcaattctgtgtgannnnnnnnnnnnnnnnnnnnnnnnatgcaagctagttttgagaaaggaaggccaaattgggtcgggggagggtgggagtgaggaagttaaaatcactatagggagaaaaaacttttttcaagatttccaaagagatgaaattttcttaatccttttaagttttcatagtaaacagtatggcagattgggttggttgtcctacctggtctatttttaaaagtcaccttttaaagtgacattattagatacacttaaatgtttccaaggcactctctacattacccttgtttttctctttggatactgtcctgggactaagtgtagatttctgcttcaagcacttctggcattgtgtgtttttgtatgcactccccttcatgccacttcagatgtttatttggatgtggttggggacgagagcagacaccaaggaaagggagttggagagaatgtaagtcctgacctgaaggtcttttgtgatgcatgtataggattgccctgacacacaccctcctttcttgggattataccagccatcttcctgagagttttggagccctctaggatattttttctagtaccccaccccccacccctaaagaaagaccttaatatgttaaaacagcattgcttggagaaggtgtcattgaattccgggacgagccggagcctttaaatgggtgcttccaccactacaggctcctgacacgagtaacaggcactgttgcttagaagaacacacgaagttgccgaacacagggtaaaatttccaaggcgctgatcgttgccctggccagggcctgatgagagccagtcagtacattctttttttcctacagttcttgggtttcaaacttcagtttcagggaatttcaagtcaacaacaggtagaatgaataaacttggttaccagcctaataatgtgaattgctacagaattattcttattatgtaagaaaacaaaaactttatgcagatactttagctataaattgatgtaaaatactgatttttttaaaggaaggagagaacagtatcttgttcaattattatgcaatcaatcagtaaatgtttttaaaatgatactacaggagagcttagtaaggagagggcatggatgggccagtttggcatagttgggagaaatcagtctggtttccatcccagtcggggaagagagaggtgagagggaatcagaacgtacctagttgattccttggtgacaagtgcaatggggtatgggtagaatttattttcagagccaagaggacttgatggttataaataaagttgcctttagcaatggaatttacagatcgatcatgttgttccgaaagatgtgaataggatccacaataacaagttgattcagactaatgtagatatttagattagcaagtattgaacatttgatttcttagactgaggttttaaatgaatttcattatttctcccggtaatacacagagcatcgggattaggaaattagccattttggattctgtctgccacaaacagacctattctaaacagtgctattaaattttagactgttgttcaaatattttattttctcctaaactactttttatggtgatgaataattaagaccatttaaaacacgggagtacaagtatttttttgaattaaattaacttgcaaaaaccaaatttgcagtggttgggttgtttctagacagactttggtatcaatttaaaaccaagataatttttatattctttccaatagaatttcatgacaactcctgcagttttcttaacctac

SEQ ID NO: 536 - DNA, 382 bp, Homo sapiens
  modified_base (289): a, t, c, g, other or unknown
gctcaaatgcccggaatgcagagctccggctgcgatggggccaaatcgtccttaagaacgaccaccaggaagatttctggaaagtgaaggagttcctgcataaccaggggaagcagaagtatacacttccgctctaccacgcaatgatgggtggcagtgaggtggcccagaccctcgccaaggagacttttgcatccaccgcctcccagctccacagcaatgttgtcaactatgtccagcagatcgtggcacccaagggcagttagaggctcgtgtgcatggcccctgnctctttcaggctctccagggtttcagaataattgtttgttcccaaattcctgtttccctgatcaatttcctgggagtttatattcccttcagg

SEQ ID NO: 537 - DNA, 1725 bp, Homo sapiens
gtttgctgtgaaccttgctacttgtacttggttgaagttctaggtacctttagtcaagggatggaaaaataaagccatacgcagttttgttacctcagttaccccaaaaataggaaaagcagcaagcacagtattttaaagatcataattcctataaaaggactgtgcacaaagtgtttagactccattttcattaggcaggttgactaaaaatgattgcagtaacaggtttatataaaatagagcaacctttcatgctgtgacacaaatcaaaaggttgataactttgtaattttactctggagattctaaccgaagttggtgtaagttttcaagagttactaaaatcaagttggaaatgatttacgtacacttccctgagcctggactaaagcctcatgcctgtaccccaagtaggtgatggtacttttctatacaaaaaggatttcctggcaggcaggtatttacaaagtttgttcctgtaccagtccaataatgacaactctaaatccagctgcaccaaatcttagtgggccatttgtcatacctatgaaaattcttcagttattaaataactttgtcagtgctacctatggtaggccggaaacaatgtagattaggaagtttcatgaaaattaacttttggggctatggagaaacagttaagtatcttaagttactaaacatttccactgaatttttggagtgagccaaggttactataaaatactttggaagatgaattctctacctggagttagtttcgagagtaagcgtagcttttaacagaaataactgcagattttaagctcataatttgcaaaaaaaatcttttattggcatgaaaataatgttgtaaatggcaccaaatattccacttaaatgcatatacagtattagagtcaaaaactattttatccctctttgctgtttttcccccttctgcccactttcctgggtgttgggggggcccgctgacaacagtcacaaatccagcgacctaggaaaaaaattgttaatatagaatgaaaaattatctttacaggactgaattttaagcccatctaaactcttctgccttagctatcactaatgatattcctctctggattttgtggtgagaagggcactatgagttccttaatttaaggaaaaaatgtaaacttaatcaatgtaatcaatgccatgcaaaattcattgcaagtcaagggggatgggagagatgcaatgccatacggtgatacggacctttaagaaagtacaatctttcctgaaattcaaacactatcatacttcaaaaggtcaaaacccattccggaatttggcttttttaagactttttctctcctgctcactggcagctgtgtgtcttaacagcattctttcaagtcctggtgtactctgctgacagcactttaaaactttaacagcacaatgataacttgtactacatacttgatctgaattactacagaaaaataattatgttgcttgcttaatgattcccaggaaacttcgttgtaggcatatattttataagagtattatacagtgttaactatgcaagtaagttctaaaattacacaattatctgtgtaatgttttagtccaattactgtgatttattcaactctgttctaaagttatctggaattgtcatgctgcctcaatttacagaaatctataatagatttctatagaaatgtaaaaaaaaaaaaaaaaaaa

SEQ ID NO: 538 - DNA, 2825 bp, Homo sapiens
ctgacaaaatgatctcaatattggtgtaaaatcacctcccctttcaagggtcttccaaagcacttcctgtctgcggcatacaaaatgtatggcacggaattttaagcttactgagctttataaacacgtcacattcacacattcaagacacacactggatattcggataaaaacaaacaaacaaaaaacaggctaaatacccattcccctcaataacttggataagatacctaaaaaaggtcgaccttcggtacctttctgtcttctcccctctcgctatttgcctacactggcttcctcacctccactttttctcacgtttatctgagcgaaaacaagcacggttcggcagcctcctttcccagccctacctttgtgctgcaaaagcgaaaattcaaaagccaagtacaataggagaccgcccaccctggctccctcgtgacacgagggagcgcgaagcggagggcgcctcgcggcaggagcgggatttccggggtcacgggaaccggcaggggaacgggataaagttcccggagaaaggaaaggagagcgtgggatagtaaaagagaagacgcggagaagaggagaggacctacaagaacggaggacaggggcgcacgatggtcccggggggagcggaaacaaaggcacgcaaaacggaaaagcgtgtgtaggggagcggaaaaggaagtcaccaccgtggcctgcgacgaaatggcgaaaagtcttttgaagacagcctctctgtctggaaggacaaaattgctacatcaaacaggattgtcactttatagtacatcccatggattttatgaggaagaagtgaaaaaaacacttcagcagtttcctggtggatccattgaccttcagaaggaagacaatggcattggcattcttactctgaacaatccaagtagaatgaatgccttttcaggtgttatgatgctacaacttctggaaaaagtaattgaattggaaaattggacagaggggaaaggcctcattgtccgtggggcaaaaaatactttctcttcaggatctgatctgaatgctgtgaaatcactaggaactccagaggatggaatggccgtatgcatgttcatgcaaaacaccttaacaagatttatgagacttcctttaataagtgttgcgctggttcaaggttgggcattgggtggaggagcagaatttactacagcatgtgatttcaggttaatgactccagagagtaagatcagattcgtccacaaagagatgggcataataccaagctggggtggcaccacccggctagttgaaataatcggaagtagacaagctctcaaagtgttgagtggggcccttaaactggattcaaaaaatgctctaaacataggaatggttgaagaggtcttgcagtcttcagatgaaactaaatctctagaagaggcacaagaatggctaaagcaattcatccaagggccaccggaagtaattagagctttgaaaaaatctgtttgttcaggcagagagctatatttggaggaagcattacagaacgaaagagatcttttaggaacagtttggggtgggcctgcaaatttagaggctattgctaagaaaggaaaatttaataaataattggtttttcgtgtggatgtactccaagtaaagctccagtgactaatatgtataaatgttaaatgatattaaatatgaacatcagaattactttgaaggctactattaatatgcagacttacttttaatcatttgaatatctgaactcatttacctcatttcttgccaattactcacttgggtatttactgcgtaatctggaacatttagctaaaatatacacttttggcttaaaaattattgctgtcaattccaataataattcttagcttataaccaaagagcagtgtttaaaaggagagcttctatacaaaacctattcctggcgttacttttcatacaatttttgttctgttttacctggaaataatttaccaaaataactgagtgttgctgctaaagaacaaaagtggggaggtatcagggaacaagaaaacaagaaagggtatgatcaatcattttcttctgctccaaacagctggagtaaaattcatgggaaatggcccttcatttaaaaaaagatgtacctcactacccactacaaatttggaactttgttcttttcaataattagttttctattgtaaattacctactaaacagtggtagccatgacatggaaagtcaactgattctacaattggacattcatttgtgtgccctggaatttccaactagtaataaacaactactgttgatgtagttttaaaccacttgaagggactcatgaagcatcctgcaacataaatttgcatttttacatcagatttcttttttttcctgaaaaacaactaaccttctaacaactatctttcaaaagtaaatgtaataaaaatgcacaacataaaatgtttatgatcccagcaatacactttttaaaaaatgtgaaagtcaaagaattaagttctagttctgactcatcacaagaggtcaaaagtatttgctactgtaacattcaattcacatttgagaatcatggtaaaaataacttgcatttgccttaccatcatgatcctactgttgagttaggaaaatatggttagacagactcacattactttttttcagaggtaaactctagattactgtgtcaacccaatactatttggccatagatgtaaaaactaccaaataaaagtggattttgtggtctacaacattttgtgtaaagtgaattcatgtctgctaacaccgttaagtctgcc

SEQ ID NO: 539 - DNA, 428 bp, Homo sapiens
  modified_base (211): a, t, c, g, other or unknown
  modified_base (229): a, t, c, g, other or unknown
  modified_base (302): a, t, c, g, other or unknown
  modified_base (314): a, t, c, g, other or unknown
  modified_base (320): a, t, c, g, other or unknown
  modified_base (347): a, t, c, g, other or unknown
  modified_base (374): a, t, c, g, other or unknown
  modified_base (387): a, t, c, g, other or unknown
  modified_base (394): a, t, c, g, other or unknown
  modified_base (399): a, t, c, g, other or unknown
  modified_base (421): a, t, c, g, other or unknown
gatccacccacctcagcctcccacagtgctgggactacaggcatgaggatcatctgaggccaagagttcaagatcagcctgggcaacatagtgataccctatctcttaaaaaagaagaagtttttaaatttgaaataataataggtactggatttatgcaaatgtcttttctgcgtcttttgagatgagtatcaggtttttttttttcctnttatcatctgatgatgancttaatgtttccatttgtattaatgggaatactaagtccctctgtgattttctgaacccaagctatttcctanggcctgagtttnattttngtttgacacagtaattaaaattagganggcccaagccgtgggtggccatgttgncctgtaagtcccnaagttgnctganggtaaggaaggatttgctttgnagcccca

SEQ ID NO: 540 - DNA, 1841 bp, Homo sapiens
  modified_base (863): a, t, c, g, other or unknown
  modified_base (867)..(868): a, t, c, g, other or unknown
gcttaagagaccccgcagtggggcgctcgtccgaagccaggccgcgtccgccatagtacctggcttggaggtgtcgccgccgctcggtgagagcccccgagcggcagggggccaacacaaaaagggagccggagaagccctagccgctgcccagcagcttgcgggcgtgttctcgcggttccgggcctcaaggcgacggaaacgaaaggcgagcgaagcgcggaggatccggcgagaagaagcgtcagggagcctcggcggtgtccccggggtccgccgaagccacccggccgccggctggggcccggggtggtgaggaagtgctccgaggcctcgccgaggcctagcgccggctttgtgtccgaggcggcggctggcggcggggggaggctggagccgggggcgtgctgcgggaaggcctctcctccgccgaccgcgcgttttcggcctaggccgtggggccgctcgtggcctccggggagcaggcgccaggggtttgtagtgcggagggggcctgggcctgggcctggggaagctgacgccggtcgtccggaagccaggaggaggcgtgaggccgctcgtggactccgggcctaggccctctcccctcaaccttctcccggggcctgggtcaccccaatccacggagagagagacccgccgggaggtgcggccgcgctatggacccctgaccccgtggggtcgctcggactcttaacgtgtggactgaccgctactgactgcaccgccaatccccccgtctctgccggccccttagcatgagcgagggggacccagccgggtgacattgtgcccgttggcggattctcgatttcccctcttccccgtcctcgtcctcctcntccnncatgaagtgattctgagtatcggggggtctctggattattgttctgacgaacccctgcttgtggttggggggtatttaatctgaggccttagggtccttcggtgtctttgagtgttttgtgtgtacatattttgctcttaaagtttataaatatacgtatattgagagtgtccacgtctcctcgctgaaccttaggaatcccttggcaccatgtcctgtgtgcattataaattttcctctaaactcaactatgataccgtcacctttgatgggctccacatctccctctgcgacttaaagaagcagattatggggagagagaagctgaaagctgccgactgcgacctgcagatcaccaatgcgcagacgaaagaagaatatactgatgataatgctctgattcctaagaattcttctgtaattgttagaagaattcctattggaggtgttaaatctacaagcaagacatatgttataagtcgaactgaaccagcgatggcaactacaaaagcagtatgtaaaaacacaatctcacactttttctacacattgcttttacctttataatgtagcagtgaagtaaatcattttagaacttaatatccaactgatcatagtacatattgtaaataaaatgtattttgatgacagctcagttgaatatggataatatgtggcatcacttgcacacttattttgtagaaatgggtaatttgtgcccgtaacactgtttcatattaaatatgatagcattatccctgtatgacactgtgttgtacagttaatgtatgatcctttttagatcgtttaggttttacactaaggaacatgatgacatgttctacatttgtctgtctatagttagtattttgtatgtatgtacaggctgttgtgtgctttttgtttcttgcaataaaaaatgtttggagtgtatattttgccatttcacgttgtatcacttagtttttgttag

SEQ ID NO: 541 - DNA, 177 bp, Homo sapiens
  modified_base (174): a, t, c, g, other or unknown
gtgcgtgtgattaccagagaactactaaaaaaaccaactgctttttaaatcctattgtgtagttaaagtgtcatgccttgaccaatctaatgaattgattaattaactgggcctttatacttaactaaataaaaaactaagcagatatgagttaaatttaaaaaaaaaaaaaanaag

SEQ ID NO: 542 - DNA, 4673 bp, Homo sapiens
  modified_base (1498)..(1622): a, t, c, g, other or unknown
  modified_base (4653)..(4655): a, t, c, g, other or unknown
  modified_base (4657): a, t, c, g, other or unknown
  modified_base (4668): a, t, c, g, other or unknown
taaggtatagtattttaaactgtgcaagtaagacttttgtctctcagctattttttgttccctatgtttgtaggatggaaaggcagatgtaaagtccctcatggcgaaatataacacggggggcaacccgacagaggatgtctcagtcaatagccgacccttcagagtcacagggccaaactcatcttcaggaatacaagcaagaaagaacttattcaacaaccaaggaaatgccagccctcctgcaggacccagcaatgtacctaagtttgggtccccaaagccacctgtggcagtcaaaccttcttctgaggaaaagcctgacaaggaacccaagcccccgtttctaaagcccactggagcaggccaaagattcggaacaccagccagcttgaccaccagagaccccgaggcgaaagtgggatttctgaaacctgtaggccccaagcccatcaacttgcccaaagaagattccaaacctacatttccctggcctcctggaaacaagccatctcttcacagtgtaaaccaagaccatgacttaaagccactaggcccgaaatctgggcctactcctccaacctcagaaaatgaacagaagcaagcgtttcccaaattgactggggttaaagggaaatttatgtcagcatcacaagatcttgaacccaagcccctcttccccaaacccgcctttggccagaagccgcccctaagtaccgaggaactcccatgaagacgaaagccccatgaagaatgtgtcttcatcaaaagggtccccagctcccctgggagtcaggtccaaaagcggccctttaaaaccagcaagggaagactcagaaaataaagaccatgcaggggagatttcaagtttgccctttcctggagtggttttgaaacctgctgcgagcaggggaggcctaggtctctccaaaaatggtgaagaaaaaaaggaagataggaagatagatgctgctaagaacaccttccagagcaaaataaatcaggaagagttggcctcagggactcctcctgccaggttccctaaggccccttctaagctgacagtgggggggccatggggccaaagtcaggaaaaggaaaagggagacaagaattcagccaccccgaaacagaagccattgcctcccttgtttaccttgggtccacctccaccaaaacccaacagaccaccaaatgttgacctgacgaaattccacaaaacctcttctggaaacagtactagcaaagggccagacgtcttactcaacaacttccctgccaccacctccaccatcccatccggccagccaaccaccattgccagcatctcacccatcacaaccaccagtcccaagcctacctcccagaaacattaaacctccgtttgacctaaaaagccctgtcaatgaagacaatcaagatggtgtcacgcactctgatggtgctggaaatctagatgaggaacaagacagtgaaggagaaacatatgaagacatagnnnnnnnnnnnnnnnnnnnnnnnnnnnnnnnnnnnnnnnnnnnnnnnnnnnnnnnnnnnnnnnnnnnnnnnnnnnnnnnnnnnnnnnnnnnnnnnnnnnnnnnnnnnnnnnnnnnnnnnnnnnnaggccctattcaagtcatccatcttgcaaaagcttgttgtgatgtcaaaggaggaaagaatgaactgagcttcaagcaaggagagcaaattgaaatcatccgcatcacagacaacccagaaggaaaatggttgggcagaacagcaaggggttcatatggctatattaaaacaactgctgtagagattgactatgattctttgaaactgaaaaaagactctcttggtgccccttcaagacctattgaagatgaccaagaagtatatgatgatgttgcagagcaggatgatattagcagccacagtcagagtggaagtggagggatattccctccaccaccagatgatgacatttatgatgggattgaagaggaagatgctgatgatggtttccctgctcctcctaaacaattggacatgggagatgaagtttacgatgatgtggatacctctgatttccctgtttcatcagcagagatgagtcaaggaactaattttggaaaagctaagacagaagaaaaggaccttaagaagctaaaaaagcaggaaaaagaagaaaaagacttcaggaaaaaatttaaatatgatggtgaaattagagtcctatattcaactaaagttacaacttccataacttctaaaaagtggggaaccagagatctacaggtaaaacctggtgaatctctagaagttatacaaaccacagatgacacaaaagttctctgcagaaatgaagaagggaaatatggttatgtccttcggagttacctagcggacaatgatggagagatctatgatgatattgctgatggctgcatctatgacaatgactagcactcaactttggtcattctgctgtgttcattaggtgccaatgtgaagtctggattttaattggcatgttattgggtatcaagaaaattaatgcacaaaaccacttattatcatttgttatgaaatcccaattatctttacaaagtgtttaaagtttgaacatagaaaataatctctctgcttaattgttatctcagaagactacattagtgagatgtaagaattattaaatattccatttccgctttggctacaattatgaagaagttgaaggtacttcttttagaccaccagtaaataatcctccttcaaaaaataaaaataaaagaaaaaggaaaatcattcaggaagaaatgacctgtctaaaaaaacctaaggaagaataataatataagaaaggaaatttaaaaacattccacaagaagaaaaattattgtttatactcctacttatggttatatcttatattctctattcaagtgacctgtcttttaaaaaggcagtgctgtcttacctcttgctagtgggttaaatgttttcaaaaattatagcagtagtagaagttttgtataaaatttgtccttatttgttaattgtatataaatgttaattatttgatacgaatgttatgcatttagtatgcacattgaagtctaaactgtagaagagtctaaaacaagttctctttttgcagattcacatactaatggtttaattctgtgctctgtttaaagtactattataactagagtagatctgaatgaggataaccctaaaatcatgaggaatggaagaatggaccttgaaactacctaggcttttatgcatggcacctctttataatgaagacactttttaaagtttttgtttttgtttcaattaccgctagatttttttttctctttttttaaaatccattttactggaaagttggccagcagagggagtagaaattattaaaattctagtgtttggattgggcccttctctaacagtacatactcattcccaaagcaatccaaaaacaaaatgtgaaccatttgggtttcaaatgttaagaacactaaatagcatgatttaaaaaatgaaaaatgctaacacccaagaaaagaagatattaagtgctttttaacaactcctagagtacaaaatgagtacatcataatgctgggctcttctactaatgaaccatcgagtgatattgaataaattatttatcttctcagtttccttatctgtaaattacaatattagactaagtaagtttttccaactcttcactaccaattaccttaggcttttataatgctccgcctacttcagtcccatgtttcagaagcttttgtctattttttaaactcattgattaaataatgattaatgcattctccacattttaatattgcaaaggcccattggagtttctgaagtggctccacagaattgaaataatttcaaataactgtaaaggaactgaaaatcttcacagagatgaagtggggtttccattaggtgctttgaaatttgataacaaatcatcaacttccactggtcaatatatagattttgggtgtctgaggccccaagattagatgccactaatctccaaagattccctccaattatgaaatattttaatgtctacttttagagagcactagccagtatatgaccatgtgattaatttcttttcacactagataaaattacctggttcaaaagtggtttttgtttattaaatttggtaataaatatatataatacacagacaggatagtttttatgctgaagtttttggccagctttagtttgaggactccttgataagcttgctaaactttcagagtgccctgagacacttccagccatccctcctcctgccttcattggggcagacttgcattgcagtctgacagtaattttttttctgattgagaattatgtaaattcaatacaatgtcagtttttaaaagtcaaagttagatcaagagaatatttcagagttttggtttacacatcaagaaacagacacacatacctaggaaagatttacacaatagataatcatcttaatgtgaaagatatttgaagtattaattttaatatattaaatatgatttctgttatagtcttctgtatggaattttgtcacttaagatgagctgcaaataaataataccttcaatggaaaaaaaaaannngnaaaaaaaaaanaaaac

SEQ ID NO: 543 - DNA, 1402 bp, Homo sapiens
tcctgctgtagtgccttctgcgccaggcccggttcaatcagcggccacaactgtctagggctcagacaccaccagccaatgagggagggcacgtggagccgcgtctgggctcgcggctcctgaccaatggggaagtggcatgtgggagggcgccggggttccccccgccaatggggagctacggcgcgcggccgggacttggaggcggtgcggcgcggcgggtgcggttcagtcggtcggcggcggcagcggaggaggaggaggaggaggaggatgaggaggatgaggaggatgtgggccacgcaggggctgggcggtggcgctggctctgagcgtgctgccgggcagccgggcgctgcggccgggcgactgcgaagtttgtatttcttatctgggaagattttaccaggacctcaaagacagagatgtcacattctcaccagccactattgaaaacgaacttataaagttctgccgggaagcaagaggcaaagagaatcggttgtgctactatatcggggccacagatgatgcagccaccaaaatcatcaatgaggtatcaaagcctctggcccaccacatccctgtggagaagatctgtgagaagcttaagaagaaggacagccagatatgtgagcttaagtatgacaagcagatcgacctgagcacagtggacctgaagaagctccgagttaaagagctgaagaagattctggatgactggggggagacatgcaaaggctgtgcagaaaagtctgactacatccggaagataaatgaactgatgcctaaatatgcccccaaggcagccagtgcacggaccgatttgtagtctgctcaatctctgttgcacctgagggggaaaaaacagttcaactgcttactcccaaaacagcctttttgtaatttattttttaagtgggctcctgacaatactgtatcagatgtgaagcctggagctttcctgatgatgctggccctacagtacccccatgaggggattcccttccttctgttgctggtgtactctaggacttcaaagtgtgtctgggatttttttattaaagaaaaaaaatttctagctgtccttgcagaattatagtgaataccaaaatggggttttgccccaggaggctcctaccagtttctgctttccagttgcagagtttggggggttattcattcccatttatctctcaacccaccagtgctgaaaataccagagcaggacataggggctggggccagctgatgtgtgtgggtgtgtaccactagagggcagcaggcactcagcagaaaggaggtggcgggggcggggggtgctgcgcttgataccctgccccttgatacagtatctgtcttacccgcccaagagagctggaggccacagctctaggaggat

SEQ ID NO: 544 - DNA, 4008 bp, Homo sapiens
ggcttcaggaagggcagacagagtgtccaaaagcgtgagagcacgaagtgaggagaaggtggagaagagagaagaggaagaggaagaggaagagaggaagcggagggaactgcggccaggctaaaaggggaagaagaggatcagcccaaggaggaggaagaggaaaacaagacaaacagccagtgcagaggagaggaacgtgtgtccagtgtcccgatccctgcggagctagtagctgagagctctgtgccctgggcaccttgcagccctgcacctgcctgccacttccccaccgaggccatgggcccaggagttctgctgctcctgctggtggccacagcttggcatggtcagggaatcccagtgatagagcccagtgtccccgagctggtcgtgaagccaggagcaacggtgaccttgcgatgtgtgggcaatggcagcgtggaatgggatggccccccatcacctcactggaccctgtactctgatggctccagcagcatcctcagcaccaacaacgctaccttccaaaacacggggacctatcgctgcactgagcctggagaccccctgggaggcagcgccgccatccacctctatgtcaaagaccctgcccggccctggaacgtgctagcacaggaggtggtcgtgttcgaggaccaggacgcactactgccctgtctgctcacagacccggtgctggaagcaggcgtctcgctggtgcgtgtgcgtggccggcccctcatgcgccacaccaactactccttctcgccctggcatggcttcaccatccacagggccaagttcattcagagccaggactatcaatgcagtgccctgatgggtggcaggaaggtgatgtccatcagcatccggctgaaagtgcagaaagtcatcccagggcccccagccttgacactggtgcctgcagagctggtgcggattcgaggggaggctgcccagatcgtgtgctcagccagcagcgttgatgttaactttgatgtcttcctccaacacaacaacactaagctcgcaatccctcaacaatctgactttcataataaccgttaccaaaaagtcctgaccctcaacctcgatcaagtagatttccaacatgccggcaactactcctgcgtggccagcaacgtgcagggcaagcactccacctccatgttcttccgggtggtagagagtgcctacttgaacttgagctctgagcagaacctcatccaggaggtgaccgtgggggaggggctcaacctcaaagtcatggtggaggcctacccaggcctgcaaggttttaactggacctacctgggacccttttctgaccaccagcctgagcccaagcttgctaatgctaccaccaaggacacatacaggcacaccttcaccctctctctgccccgcctgaagccctctgaggctggccgctactccttcctggccagaaacccaggaggctggagagctctgacgtttgagctcacccttcgataccccccagaggtaagcgtcatatggacattcatcaacggctctggcacccttttgtgtgctgcctctgggtacccccagcccaacgtgacatggctgcagtgcagtggccacactgataggtgtgatgaggcccaagtgctgcaggtctgggatgacccataccctgaggtcctgagccaggagcccttccacaaggtgacggtgcagagcctgctgactgttgagaccttagagcacaaccaaacctacgagtgcagggcccacaacagcgtggggagtggctcctgggccttcatacccatctctgcaggagcccacacgcatcccccggatgagttcctcttcacaccagtggtggtcgcctgcatgtccatcatggccttgctgctgctgctgctcctgctgctattgtacaagtataagcagaagcccaagtaccaggtccgctggaagatcatcgagagctatgagggcaacagttatactttcatcgaccccacgcagctgccttacaacgagaagtgggagttcccccggaacaacctgcagtttggtaagaccctcggagctggagcctttgggaaggtggtggaggccacggcctttggtctgggcaaggaggatgctgtcctgaaggtggctgtgaagatgctgaagtccacggcccatgctgatgagaaggaggccctcatgtccgagctgaagatcatgagccacctgggccagcacgagaacatcgtcaaccttctgggagcctgtacccatggaggccctgtactggtcatcacggagtactgttgctatggcgacctgctcaactttctgcgaaggaaggctgaggccatgctgggacccagcctgagccccggccaggaccccgagggaggcgtcgactataagaacatccacctcgagaagaaatatgtccgcagggacagtggcttctccagccagggtgtggacacctatgtggagatgaggcctgtctccacttcttcaaatgactccttctctgagcaagacctggacaaggaggatggacggcccctggagctccgggacctgcttcacttctccagccaagtagcccagggcatggccttcctcgcttccaagaattgcatccaccgggacgtggcagcgcgtaacgtgctgttgaccaatggtcatgtggccaagattggggacttcgggctggctagggacatcatgaatgactccaactacattgtcaagggcaatgcccgcctgcctgtgaagtggatggccccagagagcatctttgactgtgtctacacggttcagagcgacgtctggtcctatggcatcctcctctgggagatcttctcacttgggctgaatccctaccctggcatcctggtgaacagcaagttctataaactggtgaaggatggataccaaatggcccagcctgcatttgccccaaagaatatatacagcatcatgcaggcctgctgggccttggagcccacccacagacccaccttccagcagatctgctccttccttcaggagcaggcccaagaggacaggagagagcgggactataccaatctgccgagcagcagcagaagcggtggcagcggcagcagcagcagtgagctggaggaggagagctctagtgagcacctgacctgctgcgagcaaggggatatcgcccagcccttgctgcagcccaacaactatcagttctgctgaggagttgacgacagggagtaccactctcccctcctccaaacttcaactcctccatggatggggcgacacggggagaacatacaaactctgccttcggtcatttcactcaacagctcggcccagctctgaaacttgggaaggtgagggattcaggggaggtcagaggatcccacttcctgagcatgggccatcactgccagtcaggggctgggggctgagccctcaccccccgcctcccctactgttctcatggtgttggcctcgtgtttgctatgccaactagtagaaccttctttcctaatccccttatcttcatggaaatggactgactttatgcctatgaagtccccaggagctacactgatactgagaaaaccaggctctttggggctagacagactggcagagagtgagatctccctctctgagaggagcagcagatgctcacagaccacactcagctcaggccccttggagcaggatggctcctctaagaatctcacaggacctcttagtctctgccctatacgccgccttcactccacagcctcacccctcccacccccatactggtactgctgtaatgagccaagtggcagctaaaagttgggggtgttctgcccagtcccgtcattctgggctagaaggcaggggaccttggcatgtggctggccacaccaagcaggaagcacaaactcccccaagctgactcatcctaactaacagtcacgccgtgggatgtctctgtccacattaaactaacagcattaatgcaaaaaaaaaaaaaaa

SEQ ID NO: 545 - DNA, 333 bp, Homo sapiens
  modified_base (312): a, t, c, g, other or unknown
ctattttccacaaatcattggtttattagaaagttcctttccctcattttacagcatatatatctctatcatatgtgataaagttaaatacaatctgttatgcttgtaagtaaggtttatttttatttttacttttaaaatcactattctggaagttaaagaaaatgcccctagggaaggcaaagaggcagccagagtatggctcaatctacaagctaatggggaagcaggcacggaaaatgttaatactgtattatttatttacatggggctgaaagcaaaggaaaaatgagtcccttcacttacacaggntggatttcatttttcccgggc

SEQ ID NO: 546 - DNA, 1941 bp, Homo sapiens
  modified_base (1189)..(1246): a, t, c, g, other or unknown
aaaaaaaagaaaaaagaaaaaaagagaaaaaagcgaaataggttatattttaaaaacaatagaaaggcaataagttgcgataagctcttactattgaccaaggttatacaggaaagagactgaagtgtacccttgaataggttttctgtagtcagagttctaaactctaatttgtaacttggactttctaattgcaaatggcaataactattaagttatcagcaataataaatttagcattaaatttgagtacaatgttttgtttttgcactccccatagtgcgtatgtattaagacagtggatagtgtttaggtcctgttaattttctttggaattcaatgtggttgtgaatcaaacttaaggaaggaacgtttaaatagcaatgagatacagaattatgggcctttggaacaagcccgacttcccctaaattctccttagtttgttaataccagtattcagattcctgattcatttatacatctgtttccatatggcagggacattatgatacttaatgaataatgctttgaggagttctgcagttaactttcaagtcttccagatgattgtcaacaacaaaaaaggcttattgaatcccatcttgctatgcaagttttatcagatgatcaaatagtagatctgatacatccccattgtatgtacgacattttcaaaccaagtcttaacttttcaaggacattttagtagctaattcaggggagggggaagaatgatgcaggtttttagattgactgactatttttgagttatggggctcattttgaaagactgctgtccagatcagcttgttgctgcagataatagaaggttcttatgaatccaagttgtatattcacttgtaggataatttaaaaattagattttttttgcatatgagcaaaaaccttttgctggatacaggagaaggttggactttatctacagttatcttttgattacagcaacagctctgggtgagagtagaatttatagagggataatttgtcaagccatagaaagaaaatctaaattaatctagtaagtgtatgacctctcaccattttaagaggtatcagattcatttgcactattaggaatgctagttttgtgcaaaaataatgccttacctgttttttccccacatttaggttgaaaagctttcaaatgttccaagttatgctgaannnnnnnnnnnnnnnnnnnnnnnnnnnnnnnnnnnnnnnnnnnnnnnnnnnnnnnnnncaaaacacacaaaaataaaaagcccacactttttattcctgcttcgaaatgcaaatggatagagcacggtttctctgacagtataatgatagctttgtgagttagtttcatgtcatgctgggaactctctatgaggtggccataagcagcaaccagcccaaacacccacttgcgttctattagtatggaaccatttgcatttgttttttttaagctttatctttccttgtgcatcctgaccaagaaatatctttgattatgattaatgtattatgtcaaaatgtaggctagttaaacttttgtaaagttgcctggaatgtcatttgttaggttataaacacaagatctaaatgaagggttttatgtgttgtgtacaaatcttattttgaaatggacaaacttgtcattacatttgtaaccttgtacagaggatttttcactatgtgcctagcttggtgtccattcagctaaaattgaaaaaaaaaaaaaggtgcatgaagagttaaaaatcaaattaaagtatatgtagagatgactattttatattacatgacccaatcctgtatttatttctaccccctttttgaaagtatttataaaactagttgaggacagctgtatttttttgttgaactatttagtagaattgtgcctttttgtctgtatgtgaataaatgctgtacattttgcaatac

SEQ ID NO: 547 - DNA, 1475 bp, Homo sapiens
cctgctctatcttgtctcggtctctcactctgccttatacccctcagttgaattatttcttctgaggaggcaagaactgaggctgctgcagactgatatggattcaccactgctaacacctcctggttggaactacaggaatagaactggaaagggaaaaaaggcagcattcaccacatcccaatcctgaatccaagagtctaagatagtcccccactcctatctcaggcttagaggattagattaatctcctggaggggaagactcttccttgaaacatttttttttatctgcctgtagctattgggataattcgggaaatccacagggacagttcaagtcatctttgtcctctactttctgttgcactctcagccttgttctctttttagaaactgcatggtaactattatatagctaaagaagagcattctgacctctgccctgggacttcctggatcctcctcttcttataaatacaagggcagagctggtatcccggggagccaggaagcagtgagcccaggagtcctcggccagccctgcctgcccaccaggaggatgaaggtctccgtggctgccctctcctgcctcatgcttgttgctgtccttggatcccaggcccagttcacaaatgatgcagagacagagttaatgatgtcaaagcttccactggaaaatccagtagttctgaacagctttcactttgctgctgactgctgcacctcctacatctcacaaagcatcccgtgttcactcatgaaaagttattttgaaacgagcagcgagtgctccaagccaggtgtcatattcctcaccaagaaggggcggcaagtctgtgccaaacccagtggtccgggagttcaggattgcatgaaaaagctgaagccctactcaatataataataaagagacaaaagaggccagccacccacctccaacacctcctgagcctctgaagctcccaccaggccagctctcctcccacaacagcttcccacagcatgaagatctccgtggctgccattcccttcttcctcctcatcaccatcgccctagggaccaagactgaatcctcctcacaaactggggggaaaccgaagttgttaaaatacagctaaagttggtggggggaccttaccacccctcagagtgctgcttcacctacactacctacaagatcccgcgtcagcggattatggattactatgagaccaacagccagtgctccaagcccggaattgtcttcatcaccaaaaggggccattccgtctgtaccaaccccagtgacaagtgggtccaggactatatcaaggacatgaaggagaactgagtgacccagaaggggtggcgaaggcacagctcagagacataaagagaagatgccaaggccccctcctccacccaccgctaactctcagccccagtcaccctcttggagcttccctgctttgaattaaagaccactcatgctc

SEQ ID NO: 548 - DNA, 1187 bp, Homo sapiens
gcggccgcaccccccggccgggccgtgcttctgcccctgcaaggtttgggccgaggtgggggagggtcctggttgccggccccgcccggtccgtccccgccttttaggcgcccgcgtggccgggacgtcccagtcccgctccgtcctcctcgcctgccaccggtgcacccagtccgctcacccagcccagtccgtccggtcctcaccgcctgccggccggcccaccccccaccgcagccatggacgccatcaagaagaagatgcagatgctgaagctggacaaggagaacgccatcgaccgcgccgagcaggccgaagccgacaagaagcaagctgaggaccgctgcaagcagctggaggaggagcagcaggccctccagaagaagctgaaggggacagaggatgaggtggaaaagtattctgaatccgtgaaggaggcccaggagaaactggagcaggccgagaagaaggccactgatgctgaggcagatgtggcctccctgaaccgccgcattcagctggttgaggaggagctggaccgggcccaggagcgcctggctacagccctgcagaagctggaggaggccgagaaggcggctgatgagagcgagagaggaatgaaggtcatcgaaaaccgggccatgaaggatgaggagaagatggaactgcaggagatgcagctgaaggaggccaagcacatcgctgaggattcagaccgcaaatatgaagaggtggccaggaagctggtgatcctggaaggagagctggagcgctcggaggagagggctgaggtggccgagagccgagccagacagctggaggaggaacttcgaaccatggaccaggccctcaagtccctgatggcctcagaggaggagtattccaccaaagaagataaatatgaagaggagatcaaactgttggaggagaagctgaaggaggctgagacccgagcagagtttgccgagaggtctgtggcaaagttggagaaaaccatcgatgacctagaagagaccttggccagtgccaaggaggagaacgtcgagattcaccagaccttggaccagaccctgctggaactcaacaacctgtgagggccagccccacccccagccaggctatggttgccaccccaacccaataaaactgatgttactagcctctcaaaaaaaaagaaaaagggcggc

SEQ ID NO: 549 - DNA, 2457 bp, Homo sapiens
acccgccctcgccgctcggccccgcgcgtccccgcgcgtgccctcctcccgccacacggcacgcacgcgcgcgcagggccaagccgaggcagccgcccgcagctcgcactcgctggcgacctgctccagtctccaaagccgatggcatctccgggctctggcttttggtctttcgggtcggaagatggctctggggattccgagaatcccggcacagcgcgagcctggtgccaagtggctcagaagttcacgggcggcatcggaaacaaactgtgcgccctgctctacggagacgccgagaagccggcggagagcggcgggagccaacccccgcgggccgccgcccggaaggccgcctgcgcctgcgaccagaagccctgcagctgctccaaagtggatgtcaactacgcgtttctccatgcaacagacctgctgccggcgtgtgatggagaaaggcccactttggcgtttctgcaagatgttatgaacattttacttcagtatgtggtgaaaagtttcgatagatcaaccaaagtgattgatttccattatcctaatgagcttctccaagaatataattgggaattggcagaccaaccacaaaatttggaggaaattttgatgcattgccaaacaactctaaaatatgcaattaaaacagggcatcctagatacttcaatcaactttctactggtttggatatggttggattagcagcagactggctgacatcaacagcaaatactaacatgttcacctatgaaattgctccagtatttgtgcttttggaatatgtcacactaaagaaaatgagagaaatcattggctggccagggggctctggcgatgggatattttctcccggtggcgccatatctaacatgtatgccatgatgatcgcacgctttaagatgttcccagaagtcaaggagaaaggaatggctgctcttcccaggctcattgccttcacgtctgaacatagtcatttttctctcaagaagggagctgcagccttagggattggaacagacagcgtgattctgattaaatgtgatgagagagggaaaatgattccatctgatcttgaaagaaggattcttgaagccaaacagaaagggtttgttcctttcctcgtgagtgccacagctggaaccaccgtgtacggagcatttgaccccctcttagctgtcgctgacatttgcaaaaagtataagatctggatgcatgtggatgcagcttggggtgggggattactgatgtcccgaaaacacaagtggaaactgagtggcgtggagagggccaactctgtgacgtggaatccacacaagatgatgggagtccctttgcagtgctctgctctcctggttagagaagagggattgatgcagaattgcaaccaaatgcatgcctcctacctctttcagcaagataaacattatgacctgtcctatgacactggagacaaggccttacagtgcggacgccacgttgatgtttttaaactatggctgatgtggagggcaaaggggactaccgggtttgaagcgcatgttgataaatgtttggagttggcagagtatttatacaacatcataaaaaaccgagaaggatatgagatggtgtttgatgggaagcctcagcacacaaatgtctgcttctggtacattcctccaagcttgcgtactctggaagacaatgaagagagaatgagtcgcctctcgaaggtggctccagtgattaaagccagaatgatggagtatggaaccacaatggtcagctaccaacccttgggagacaaggtcaatttcttccgcatggtcatctcaaacccagcggcaactcaccaagacattgacttcctgattgaagaaatagaacgccttggacaagatttataataaccttgctcaccaagctgttccacttctctagagaacatgccctcagctaagccccctactgagaaacttcctttgagaattgtgcgacttcacaaaatgcaaggtgaacaccactttgtctctgagaacagacgttaccaattatggagtgtcaccagctgccaaaatcgtaggtgttggctctgctggtcactggagtagttgctactcttcagaatatggacaaagaaggcacaggtgtaaatatagtagcaggatgaggaacctcaaactgggtatcatttgcacgtgctcttctgttctcaaatgctaaatgcaaacactgtgtatttattagttaggtgtgccaaactaccgttcccaaattggtgtttctgaatgacatcaacattcccccaacattactccattactaaagacagaaaaaaataaaaacataaaatatacaaacatgtggcaacctgttcttcctaccaaatataaacttgtgtatgatccaagtattttatctgtgttgtctctctaaacccaaataaatgtgtaaatgtggacaca

SEQ ID NO: 550 - DNA, 4031 bp, Homo sapiens
ttaatacgaccactatagggaatttggccctcgaggcaagaattcggcacgatgcgtgaacaaatagctgaggggcggccgggccagaacggcttgtgtaactttgcaaacgtgccagaaagtttaaaatctctcctccttccttcactccagacactgcccgctctccgggactgccgcgccgctccccgttgccttccaggactgagaaaggggaaagggaagggtgccacgtccgagcagccgccttgactggggaagggtctgaatcccacccttggcattgcttggtggagactgagatacccgtgctccgctcgcctccttggttgaagatttctccttccctcacgtgatttgagccccgtttttattttctgtgagccacgtcctcctcgagcggggtcaatctggcaaaaggagtgatgcgcttcgcctggaccgtgctcctgctcgggcctttgcagctctgcgcgctagtgcactgcgcccctcccgccgccggccaacagcagcccccgcgcgagccgccggcggctccgggcgcctggcgccagcagatccaatgggagaacaacgggcaggtgttcagcttgctgagcctgggctcacagtaccagcctcagcgccgccgggacccgggcgccgccgtccctggtgcagccaacgcctccgcccagcagccccgcactccgatcctgctgatccgcgacaaccgcaccgccgcggcgcgaacgcggacggccggctcatctggagtcaccgctggccgccccaggcccaccgcccgtcactggttccaagctggctactcgacatctagagcccgcgaagctgcggcctcgcgcgcggagaaccagacagcgccgggagaagttcctgcgctcagtaacctgcggccgcccagccgcgtggacggcatggtgggcgacgacccttacaacccctacaagtactctgacgacaacccttattacaactactacgatacttatgaaaggcccagacctgggggcaggtaccggcccggatacggcactggctacttccagtacggtctcccagacctggtggccgacccctactacatccaggcgtccacgtacgtgcagaagatgtccatgtacaacctgagatgcgcggcggaggaaaactgtctggccagtacagcatacagggcagatgtcagagattatgatcacagggtgctgctcagatttccccaaagagtgaaaaaccaagggacatcagatttcttacccagccgaccaagatattcctgggaatggcacagttgtcatcaacattaccacagtatggatgagtttagccactatgacctgcttgatgccaacacccagaggagagtggctgaaggccacaaagcaagtttctgtcttgaagacacatcctgtgactatggctaccacaggcgatttgcatgtactgcacacacacagggattgagtcctggctgttatgatacctatggtgcagacatagactgccagtggattgatattacagatgtaaaacctggaaactatatcctaaaggtcagtgtaaaccccagctacctggttcctgaatctgactataccaacaatgttgtgcgctgtgacattcgctacacaggacatcatgcgtatgcctcaggctgcacaatttcaccgtattagaaggcaaagcaaaactcccaatggataaatcagtgcctggtgttctgaagtgggaaaaaatagactaacttcagtaggatttatgtattttgaaaaagagaacagaaaacaacaaaagaatttttgtttggactgttttcaataacaaagcacataactggattttgaacgcttaagtcatcattacttgggaaatttttaatgtttattatttacatcactttgtgaattaacacagtgtttcaattctgtaattacatatttgactctttcaaagaaatccaaatttctcatgttccttttgaaattgtagtgcaaaatggtcagtattatctaaatgaatgagccaaaatgactttgaactgaaacttttctaaagtgctggaactttagtgaaacataataataatgggtttatatatgtcatagcatagatgaatttagaaacaatgctcctactgtttaaatacatatggacacatctggtgctgagaaagaaacaaacacattaccattggtgtcaagaaatattactatatagcagagaaatggcaatacatgtactcagatagttacatccctatataaaaagtatgtttacatttaaaaaattagtagataacttcctttctttcaagtgcacaatttcattttgacttgagtcaacttttgttttggaacaaattaagtaagggagctgcccaatcctgtctgatatttcttgaggctgccctctatcattttatctttcccatgggcagagatgttgtaagtgggattcttaatatcaccattcttgggactggtatacataaggcagccgtgaaactggaaagtcattttgatgactgatgtgatacatccagaggtaaaatgcatttaaacatattaaagtatttgccaaagatacaattttcttgctgacataaaaatcacacaaacaagtcccccccaaaccacaactgtctctcaaatagcttaaaaaaattgaaaaacattttaggatttttcaagttttctagattttaaaaagatgttcagctattagaggaatgttaaaaattttatattatctagaacacaggaacatcatcctgggttattcaggaatcagtcacacatgtgtgtgtgtctgagatatagtctaaattagcaaagcacatagtattacatacttgaggggttggtgaacaaaggaaaaatatactttctgcaaaaccaaggactgtgctgcgtaatgagacagctgtgatttcatttgaaactgtgaaaccatgtgccataatagaattttgagaattttgcttttacctaaattcaagaaaatgaaattacacttttaagttagtggtgcttaagcataatttttcctatattaaccagtattaaaatctcaagtaagattttccagtgccagaacatgttaggtggaattttaaaagtgcctcggcatcctgtattacatgtcatagaattgtaaagtcaacatcaattactagtaatcattctgcactcactgggtgcatagcatggttagaggggctagagatggaccagtcatcaactggcggatatagcggtacatatgatccttagccaccagggcacaagcttaccagtagacaatacagacagagcttttgttgagctgtaactgagctatggaatagcttctttgatgtacctctttgccttaaattgctttttagttctaagattgtagaatgatcctttcaaattgtaatcttttctaacagagatattttaatatacttgctttcttaaaaaacaaaaaaactactgtcagtattaatactgagccagactggcatctacagatttcagatctatcattttattgattcttaagcttgtattaaaaactaggcaatatcatcatggatacataggagaagacacatttacaatcattcattgggccttttatctgtctatccatccatcatcatttgaaggcctaatatatgccaagtactcacatggtatgcattgagacataaaaaagactgtctataacctcaataagtattaaaaatcccattattacccataaggttcatcttatttcatttttagggaataaaattacatgtctatgaaatttcaattttaagcactattgtttttcatgaccataatttatttttaaaaataaattaaaggttaattatatgcatgtatgtatttctaataattaaaaatgtgttcaatccctgaaatgtctgccttttaaatataacacctactatttggttaattttgacgatttttttttttcaattaggaagctaaaaatactactttattccttatatgaacattcatcccccc

SEQ ID NO: 551 - DNA, 3945 bp, Homo sapiens
accgctccggagcgggaggggaggcttcgcggaacgctctcggcgccaggactcgcgtgcaaagcccaggcccgggcggccagaccaagagggaagaagcacagaattcctcaactcccagtgtgcccatgagtaagagcaaatgctccgtgggactcatgtcttccgtggtggccccggctaaggagcccaatgccgtgggcccgaaggaggtggagctcatccttgtcaaggagcagaacggagtgcagctcaccagctccaccctcaccaacccgcggcagagccccgtggaggcccaggatcgggagacctggggcaagaagatcgactttctcctgtccgtcattggctttgctgtggacctggccaacgtctggcggttcccctacctgtgctacaaaaatggtggcggtgccttcctggtcccctacctgctcttcatggtcattgctgggatgccacttttctacatggagctggccctcggccagttcaacagggaaggggccgctggtgtctggaagatctgccccatactgaaaggtgtgggcttcacggtcatcctcatctcactgtatgtcggcttcttctacaacgtcatcatcgcctgggcgctgcactatctcttctcctccttcaccacggagctcccctggatccactgcaacaactcctggaacagccccaactgctcggatgcccatcctggtgactccagtggagacagctcgggcctcaacgacacttttgggaccacacctgctgccgagtactttgaacgtggcgtgctgcacctccaccagagccatggcatcgacgacctggggcctccgcggtggcagctcacagcctgcctggtgctggtcatcgtgctgctctacttcagcctctggaagggcgtgaagacctcagggaaggtggtatggatcacagccaccatgccatacgtggtcctcactgccctgctcctgcgtggggtcaccctccctggagccatagacggcatcagagcatacctgagcgttgacttctaccggctctgcgaggcgtctgtttggattgacgcggccacccaggtgtgcttctccctgggcgtggggttcggggtgctgatcgccttctccagctacaacaagttcaccaacaactgctacagggacgcgattgtcaccacctccatcaactccctgacgagcttctcctccggcttcgtcgtcttctccttcctggggtacatggcacagaagcacagtgtgcccatcggggacgtggccaaggacgggccagggctgatcttcatcatctacccggaagccatcgccacgctccctctgtcctcagcctgggccgtggtcttcttcatcatgctgctcaccctgggtatcgacagcgccatgggtggtatggagtcagtgatcaccgggctcatcgatgagttccagctgctgcacagacaccgtgagctcttcacgctcttcatcgtcctggcgaccttcctcctgtccctgttctgcgtcaccaacggtggcatctacgtcttcacgctcctggaccattttgcagccggcacgtccatcctctttggagtgctcatcgaagccatcggagtggcctggttctatggtgttgggcagttcagcgacgacatccagcagatgaccgggcagcggcccagcctgtactggcggctgtgctggaagctggtcagcccctgctttctcctgttcgtggtcgtggtcagcattgtgaccttcagacccccccactacggagcctacatcttccccgactgggccaacgcgctgggctgggtcatcgccacatcctccatggccatggtgcccatctatgcggcctacaagttctgcagcctgcctgggtcctttcgagagaaactggcctacgccattgcacccgagaaggaccgtgagctggtggacagaggggaggtgcgccagttcacgctccgccactggctcaaggtgtagagggagcagagacgaagaccccaggaagtcatcctgcaatgggagagacacgaacaaaccaaggaaatctaagtttcgagagaaaggagggcaacttctactcttcaacctctactgaaaacacaaacaacaaagcagaagactcctctcttctgactgtttacacctttccgtgccgggagcgcacctcgccgtgtcttgtgttgctgtaataacgacgtagatctgtgcagcgaggtccaccccgttgttgtccctgcagggcagaaaaacgtctaacttcatgctgtctgtgtgaggctccctccctccctgctccctgctcccggctctgaggctgccccaggggcactgtgttctcaggcggggatcacgatccttgtagacgcacctgctgagaatccccgtgctcacagtagcttcctagaccatttactttgcccatattaaaaagccaagtgtcctgcttggtttagctgtgcagaaggtgaaatggaggaaaccacaaattcatgcaaagtcctttcccgatgcgtggctcccagcagaggccgtaaattgagcgttcagttgacacattgcacacacagtctgttcagaggcattggaggatgggggtcctggtatgtctcaccaggaaattctgtttatgttcttgcagcagagagaaataaaactccttgaaaccagctcaggctactgccactcaggcagcctgtgggtccttgtggtgtagggaacggcctgagaggagcgtgtcctatccccggacgcatgcagggcccccacaggagcgtgtcctatccccggacgcatgcagggcccccacaggagcatgtcctatccctggacgcatgcagggcccccacaggagcgtgtactaccccagaacgcatgcagggcccccacaggagcgtgtactaccccaggacgcatgcagggcccccactggagcgtgtactaccccaggacgcatgcagggcccccacaggagcgtgtcctatccccggaccggacgcatgcagggcccccacaggagcgtgtactaccccaggacgcatgcagggcccccacaggagcgtgtactaccccaggatgcatgcagggcccccacaggagcgtgtactaccccaggacgcatgcagggcccccatgcaggcagcctgcagaccacactctgcctggccttgagccgtgacctccaggaagggaccccactggaattttatttctctcaggtgcgtgccacatcaataacaacagtttttatgtttgcgaatggctttttaaaatcatatttacctgtgaatcaaaacaaattcaagaatgcagtatccgcgagcctgcttgctgatattgcagtttttgtttacaagaataattagcaatactgagtgaaggatgttggccaaaagctgctttccatggcacactgccctctgccactgacaggaaagtggatgccatagtttgaattcatgcctcaagtcggtgggcctgcctacgtgctgcccgagggcaggggccgtgcagggccagtcatggctgtcccctgcaagtggacgtgggctccagggactggagtgtaatgctcggtgggagccgtcagcctgtgaactgccaggcagctgcagttagcacagaggatggcttccccattgccttctggggagggacacagaggacggcttccccatcgccttctggccgctgcagtcagcacagagagcggcttccccattgccttctggggagggacacagaggacagcttccccatcgccttctggctgctgcagtcagcacagagagcggcttccccatcgccttctggggaggggctccgtgtagcaacccaggtgttgtccgtgtctgttgaccaatctctattcagcatcgtgtgggtccctaagcacaataaaagacatccacaatggaaaaaaaaaaaggaattc

SEQ ID NO: 552 - DNA, 4353 bp, Homo sapiens
gcgccctggggccgaggccaccgggaaggtgaatgtcaagacgctgcgtctgggaccgctcagcaaggctggcttctacctggccttccaggaccagggtgcctgcatggccctgctatccctgcacctcttctacaaaaagtgcgcccagctgactgtgaacctgactcgattcccggagactgtgcctcgggagctggttgtgcccgtggccggtagctgcgtggtggatgccgtccccgcccctggccccagccccagcctctactgccagcacgctccgggcccgccgcccgcgcgcgcggaacagacgcggggccacacttggcgccgacgaccggtgccccgcacgctcgcatgggcccgcgctgagggccccgacgaggagtcccgcgcggagtatcggagtccacccgcccagggagagtcagacctgggggggcgagggccccccaaactcagttcggatcctacccgagtgaggcggcgccatggagctccgggtgctgctctgctgggcttcgttggccgcagctttggaagagaccctgctgaacacaaaattggaaactgctgatctgaagtgggtgacattccctcaggtggacgggcagtgggaggaactgagcggcctggatgaggaacagcacagcgtgcgcacctacgaagtgtgtgacgtgcagcgtgccccgggccaggcccactggcttcgcacaggttgggtcccacggcggggcgccgtccacgtgtacgccacgctgcgcttcaccatgctcgagtgcctgtccctgcctcgggctgggcgctcctgcaaggagaccttcaccgtcttctactatgagagcgatgcggacacggccacggccctcacgccagcctggatggagaacccctacatcaaggtggacacggtggccgcggagcatctcacccggaagcgccctggggccgaggccaccgggaaggtgaatgtcaagacgctgcgtctgggaccgctcagcaaggctggcttctacctggccttccaggaccagggtgcctgcatggccctgctatccctgcacctcttctacaaaaagtgcgcccagctgactgtgaacctgactcgattcccggagactgtgcctcgggagctggttgtgcccgtggccggtagctgcgtggtggatgccgtccccgcccctggccccagccccagcctctactgccgtgaggatggccagtgggccgaacagccggtcacgggctgcagctgtgctccggggttcgaggcagctgaggggaacaccaagtgccgagcctgtgcccagggcaccttcaagcccctgtcaggagaagggtcctgccagccatgcccagccaatagccactctaacaccattggatcagccgtctgccagtgccgcgtcgggtacttccgggcacgcacagacccccggggtgcaccctgcaccacccctccttcggctccgcggagcgtggtttcccgcctgaacggctcctccctgcacctggaatggagtgcccccctggagtctggtggccgagaggacctcacctacgccctccgctgccgggagtgccgacccggaggctcctgtgcgccctgcgggggagacctgacttttgaccccggcccccgggacctggtggagccctgggtggtggttcgagggctacgtcctgacttcacctatacctttgaggtcactgcattgaacggggtatcctccttagccacggggcccgtcccatttgagcctgtcaatgtcaccactgaccgagaggtacctcctgcagtgtctgacatccgggtgacgcggtcctcacccagcagcttgagcctggcctgggctgttccccgggcacccagtggggctgtgctggactacgaggtcaaataccatgagaagggcgccgagggtcccagcagcgtgcggttcctgaagacgtcagaaaaccgggcagagctgcgggggctgaagcggggagccagctacctggtgcaggtacgggcgcgctctgaggccggctacgggcccttcggccaggaacatcacagccagacccaactggatgagagcgagggctggcgggagcagctggccctgattgcgggcacggcagtcgtgggtgtggtcctggtcctggtggtcattgtggtcgcagttctctgcctcaggaagcagagcaatgggagagaagcagaatattcggacaaacacggacagtatctcatcggacatggtactaaggtctacatcgaccccttcacttatgaagaccctaatgaggctgtgagggaatttgcaaaagagatcgatgtctcctacgtcaagattgaagaggtgattggtgcaggtgagtttggcgaggtgtgtcgggggcggctcaaggccccagggaagaaggagagctgtgtggcaatcaagaccctgaagggtggctacacggagcggcagcggcgtgagtttctgagcgaggcctccatcatgggccagttcgagcaccccaatatcatccgcctggagggcgtggtcaccaacagcatgcccgtcatgattctcacagagttcatggagaacggcgccctggactccttcctgcggctaaacgacggacagttcacagtcatccagctgcgtgggcatgctgcggggcatcgcctcgggcatgcggtaccttgccgagatgagctacgtccaccgagacctggctgctcgcaacatcctagtcaacagcaacctcgtctgcaaagtgtctgactttggcctttcccgattcctggaggagaactcttccgatcccacctacacgagctccctgggaggaaagattcccatccgatggactgccccggaggccattgccttccggaagttcacttccgccagtgatgcctggagttacgggattgtgatgtgggaggtgatgtcatttggggagaggccgtactgggacatgagcaatcaggacgtgatcaatgccattgaacaggactaccggctgcccccgcccccagactgtcccacctccctccaccagctcatgctggactgttggcagaaagaccggaatgcccggccccgcttcccccaggtggtcagcgccctggacaagatgatccggaaccccgccagcctcaaaatcgtggcccgggagaatggcggggcctcacaccctctcctggaccagcggcagcctcactactcagcttttggctctgtgggcgagtggcttcgggccatcaaaatgggaagatacgaagaaagtttcgcagccgctggctttggctccttcgagctggtcagccagatctctgctgaggacctgctccgaatcggagtcactctggcgggacaccagaagaaaatcttggccagtgtccagcacatgaagtcccaggccaagccgggaaccccgggtgggacaggaggaccggccccgcagtactgacctgcaggaactccccaccccagggacaccgcctccccattttccggggcagagtggggactcacagaggcccccagccctgtgccccgctggattgcactttgagcccgtggggtgaggagttggcaatttggagagacaggatttgggggttctgccataataggaggggaaaatcaccccccagccacctcggggaactccagaccaagggtgagggcgcctttccctcaggactgggtgtgaccagaggaaaaggaagtgcccaacatctcccagcctccccaggtgcccccctcaccttgatgggtgcgttcccgcagaccaaagagagtgtgactcccttgccagctccagagtgggggggctgtcccagggggcaagaaggggtgtcagggcccagtgacaaaatcattggggtttgtagtcccaacttgctgctgtcaccaccaaactcaatcatttttttcccttgtaaatgcccctcccccagctgctgccttcatattgaaggtttttgagttttgtttttggtcttaatttttctccccgttccctttttgtttcttcgttttgtttttctaccgtccttgtcataactttgtgttggagggaacctgtttcactatggcctcctttgcccaagttgaaacaggggcccatcatcatgtctgtttccagaacagtgccttggtcatcccacatccccggaccccgcctgggacccccaagctgtgtcctatgaaggggtgtggggtgaggtagtgaaaagggcggtagttggtggtggaacccagaaacggacgccggtgcttggaggggttcttaaattatatttaaaaaagtaactttttgtataaataaaagaaaatgggacgtgtcccagctccaggggtg

SEQ ID NO: 553 - DNA, 5772 bp, Homo sapiens
  modified_base (5240)..(5365): a, t, c, g, other or unknown
gagctgtagattcggcacgagacactgactgcacccctcccagatttcttttacattaactaaaaagtcttatcacacaatctcataaaatttatgtaatttcatttaattttagccacaaatcatcttcaaaatgacgaggattttgacagctttcaaagtggtgaggacactgaagactggttttggctttaccaatgtgactgcacaccagaaatggaaattttcaagacctggcatcaggctcctttctgtcaaggcacagacagcacacattgtcctggaagatggaactaagatgaaaggttactcctttggccatccatcctctgttgctggtgaagtggtttttaatactggcctgggagggtacccagaagctattactgaccctgcctacaaaggacagattctcacaatggccaaccctattattgggaatggtggagctcctgatactactgctctggatgaactgggacttagcaaatatttggagtctaatggaatcaaggtttcaggtttgctggtgctggattatagtaaagactacaaccactggctggctaccaagagtttagggcaatggctacaggaagaaaaggttcctgcaatttatggagtggacacaagaatgctgactaaaataattcgggataagggtaccatgcttgggaagattgaatttgaaggtcagcctgtggattttgtggatccaaataaacagaatttgattgctgaggtttcaaccaaggatgtcaaagtgtacggcaaaggaaaccccacaaaagtggtagctgtagactgtgggattaaaaacaatgtaatccgcctgctagtaaagcgaggagctgaagtgcacttagttccctggaaccatgatttcaccaagatggagtatgatgggattttgatcgcgggaggaccggggaacccagctcttgcagaaccactaattcagaatgtcagaaagattttggagagtgatcgcaaggagccattgtttggaatcagtacaggaaacttaataacaggattggctgctggtgccaaaacctacaagatgtccatggccaacagagggcagaatcagcctgttttgaatatcacaaacaaacaggctttcattactgctcagaatcatggctatgccttggacaactctctccctgctggctggaaaccactttttgtgaatgtcaacgatcaaacaaatgaggggattatgcatgagagcaaacccttcttcgctgtgcagttccacccagaggtcaccccggggccaatagacactgagtacctgtttgattcctttttctcactgataaagaaaggaaaagctaccaccattacatcagtcttaccgaagccagcactagttgcatctcgggttgaggtttccaaagtccttattctaggatcaggaggtctgtccattggtcaggctggagaatttgattactcaggatctcaagctgtaaaagccatgaaggaagaaaatgtcaaaactgttctgatgaacccaaacattgcatcagtccagaccaatgaggtgggcttaaagcaagcggatactgtctactttcttcccatcacccctcagtttgtcacagaggtcatcaaggcagaacagccagatgggttaattctgggcatgggtggccagacagctctgaactgtggagtggaactattcaagagaggtgtgctcaaggaatatggtgtgaaagtcctgggaacttcagttgagtccattatggctacggaagacaggcagctgttttcagataaactaaatgagatcaatgaaaagattgctccaagttttgcagtggaatcgattgaggatgcactgaaggcagcagacaccattggctacccagtgatgatccgttccgcctatgcactgggtgggttaggctcaggcatctgtcccaacagagagactttgatggacctcagcacaaaggcctttgctatgaccaaccaaattctggtggagaagtcagtgacaggttggaaagaaatagaatatgaagtggttcgagatgctgatgacaattgtgtcactgtctgtaacatggaaaatgttgatgccatgggtgttcacacaggtgactcagttgttgtggctcctgcccagacactctccaatgccgagtttcagatgttgagacgtacttcaatcaatgttgttcgccacttgggcattgtgggtgaatgcaacattcagtttgcccttcatcctacctcaatggaatactgcatcattgaagtgaatgccagactgtcccgaagctctgctctggcctcaaaagccactggctacccattggcattcattgctgcaaagattgccctaggaatcccacttccaggaattaagaacgtcgtatccgggaagacatcagcctgttttgaacctagcctggattacatggtcaccaagattccccgctgggatcttgaccgttttcatggaacatctagccgaattggtagctctatgaaaagtgtaggagaggtcatggctattggtcgtacctttgaggagagtttccagaaagctttacggatgtgccacccatctatagaaggtttcactccccgtctcccaatgaacaaagaatggccatctaatttagatcttagaaaagagttgtctgaaccaagcagcacgcgtatctatgccattgccaaggccattgatgacaacatgtcccttgatgagattgagaagctcacatacattgacaagtggtttttgtataagatgcgtgatattttaaacatggaaaagacactgaaagggctcaacagtgagtccatgacagaagaaaccctgaaaagggcaaaggagattgggttctcagataagcagatttcaaaatgccttgggctcactgaggcccagacaagggagctgaggttaaagaaaaacatccacccttgggttaaacagattgatacactggctgcagaatacccatcagtaacaaactatctctatgttacctacaatggtcaggagcatgatgtcaattttgatgaccatggaatgatggtgctaggctgtggtccatatcacattggcagcagtgtggaatttgattggtgtgctgtctctagtatccgcacactgcgtcaacttggcaagaagacggtggtggtgaattgcaatcctgagactgtgagcacagactttgatgagtgtgacaaactgtactttgaagagttgtccttggagagaatcctagacatctaccatcaggaggcatgtggtggctgcatcatatcagttggaggccagattccaaacaacctggcagttcctctatacaagaatggtgtcaagatcatgggcacaagccccctgcagatcgacagggctgaggatcgctccatcttctcagctgtcttggatgagctgaaggtggctcaggcaccttggaaagctgttaatactttgaatgaagcactggaatttgcaaagtctgtggactacccctgcttgttgaggccttcctatgttttgagtgggtctgctatgaatgtggtattctctgaggatgagatgaaaaaattcctagaagaggcgactagagtttctcaggagcacccagtggtgctgacaaaatttgttgaaggggcccgagaagtagaaatggacgctgttggcaaagatggaagggttatctctcatgccatctctgaacatgttgaagatgcaggtgtccactcgggagatgccactctgatgctgcccacacaaaccatcagccaaggggccattgaaaaggtgaaggatgctacccggaagattgcaaaggcttttgccatctctggtccattcaacgtccaatttcttgtcaaaggaaatgatgtcttggtgattgagtgtaacttgagagcttctcgatccttcccctttgtttccaagactcttggggttgacttcattgatgtggccaccaaggtgatgattggagagaatgttgatgagaaacatcttccaacattggaccatcccataattcctgctgactatgttgcaattaaggctcccatgttttcctggccccggttgagggatgctgaccccattctgagatgtgagatggcttccactggagaggtggcttgctttggtgaaggtattcatacagccttcctaaaggcaatgctttccacaggatttaagataccccagaaaggcatcctgataggcatccagcaatcattccggccaagattccttggtgtggctgaacaattacacaatgaaggtttcaagctgtttgccacggaagccacatcagactggctcaacgccaacaatgtccctgccaccccagtggcatggccgtctcaagaaggacagaatcccagcctctcttccatcagaaaattgattagagatggcagcattgacctagtgattaaccttcccaacaacaacactaaatttgtccatgataattatgtgattcggaggacagctgttgatagtggaatccctctcctcactaattttcaggtgaccaaactttttgctgaagctgtgcagaaatctcgcaaggtggactccaagagtcttttccactacaggcagtacagtgctggaaaagcagcatagagatgcagacaccccagccccattattaaatcaacctgagccacatgttatctaaaggaactgattcacaactttctcagagatgaatattgataactaaacttcatttcagtttactttgttatgccttaatattctgtgtcttttgcaattaaattgtcagtcacttcttcaaaaccttacagtccttcctaagttactcttcatgagatttcatccatttactaatactgtatttttggtggactaggcttgcctatgtgcttatgtgtagctttttactttttatggtgctgattaatggtgatcaaggtaggaaaagttgctgttctattttctgaactccttctatactttaagatactctatttttaaaacactatctgcaaactcaggacactttaacagggcagaatactctaaaaacttgataaaattaaatatagatttaatttatgaaccttccatcatgatgtttgtgtattgcttctttttggatcctcattctcacccatttggctaatccaggaatattgttatcccttcccattatattgaagttgagaaatgtgacagaggcatttagagtatggacttttctaanctnnnnnnnnnnnnnnnnnnnnnnnnnnnnnnnnnnnnnnnnnnnnnnnnnnnnnnnnnnnnnnnnnnnnnnnnnnnnnnnnnnnnnnnnnnnnnnnnnnnnnnnnnnnnnnnnnnnnnnnnnnnatggatttctttaaggaatactggtttgcagttttgttttctggactatatcagcagatggtagacagtgtttatgtagatgtgttgttgtttttatcattggattttaacttggcccgagtgaaataatcagatttttgtcattcacactctcccccagttttggaataacttggaagtaaggttcattcccttaagacgatggattctgttgaactatggggtcccacactgcactattaattccacccactgtaagggcaaggacaccattccttctacatataagaaaaaagtctctccccaagggcagcctttgttacttttaaatattttctgttattacaagtgctctaattgtgaacttttaaataaaatactattaagaggtaaaaaaaaacaaaagg

SEQ ID NO: 554 - DNA, 345 bp, Homo sapiens
  modified_base (92): a, t, c, g, other or unknown
  modified_base (107): a, t, c, g, other or unknown
  modified_base (113)..(114): a, t, c, g, other or unknown
  modified_base (127): a, t, c, g, other or unknown
  modified_base (131)..(132): a, t, c, g, other or unknown
  modified_base (134): a, t, c, g, other or unknown
  modified_base (142): a, t, c, g, other or unknown
  modified_base (147): a, t, c, g, other or unknown
  modified_base (153)..(156): a, t, c, g, other or unknown
  modified_base (159): a, t, c, g, other or unknown
  modified_base (184): a, t, c, g, other or unknown
  modified_base (187): a, t, c, g, other or unknown
  modified_base (198): a, t, c, g, other or unknown
  modified_base (200): a, t, c, g, other or unknown
  modified_base (213): a, t, c, g, other or unknown
  modified_base (217): a, t, c, g, other or unknown
gattatatcatggtatatgaagcactggtgaggtctatgtcaccagaaattcccagtttgctgatttcattgagttttttaacccgatgatngtactgcaacaagtnagcatnngtcactgcaaccnaacnngngggggggnaggtncacccnnnnttnttttttgaaagggttcccattttcnaanggggaaaccgntntttttcttccctncccngttattatccagctttgtattgcaaacaatgactctcctgttgttctcattgaagcgtggggttaaagtgggagggcaacatcattccctctttgggaaatctaaggcaattctgtttgcattggggc

SEQ ID NO: 555 - DNA, 1233 bp, Homo sapiens
gcccagcctcctcactagcactgtgcaagtggccagtgacaacctgatcccccaaataagagataaagaagaccctcaagagatgccccactctcccttgggctctatgccagagataagagataattctccagaaccaaatgacccagaagagccccaggaggtgtccagcacaccttcagacaagaaaggaaagaaaagaaaaagatgtatctggtcaactccaaaaaggagacataagaaaaaaagcctcccaagagagatcattgatggcacttcagaaatgaatgaaggaaagaggtcccagaagacgcctagtacaccacgaagggtcacacaaggggcagcctcacctgggcatggcatccaagagaagctccaagtggtggataaggtgactcaaaggaaagacgactcaacctggaactcagaggtcatgatgagggtccaaaaggcaagaactaaatgtgcccgaaagtccagattgaaagaaaagaaaaaggagaaagatatctgttcaagctcaaaaaggagatttcagaaaaatattcaccgaagaggaaaacccaaaagtgacactgtggattttcactgttctaagctccccgtgacctgtggtgaggcgaaagggattttatataagaagaaaatgaaacacggatcctcagtgaagtgcattcggaatgaggatggaacttggttaacaccaaatgaatttgaagtcgaaggaaaaggaaggaacgcaaagaactggaaacggaatatacgttgtgaaggaacgaccctaggagagctgctgaagagtggacttttgctctgtcctccaagaataaatctcaagagagagttaaatagcaagtgaatttctactaccctctcagtcaccatgttgcagactttccctgtctggaggctcaccttagagcttctgagtttccaagctctgagtcacctccacatttgggcatggcatcttcaaaacaattaatttgcatagttaatttgggatggggaagcaaatgactctaaaataaatctcaagagagagttcaatagcaagtgaatttctactaccctctcagtcaccatgttgcagactttccctgtctggaggctcaccttagagcttctgagtttccaagctctgagtcacctccacatttgggcatggcatcttcaaaacaattaatttgcatagttaatttgggatggggaagccaatgactcttaaat

SEQ ID NO: 556 - DNA, 2012 bp, Homo sapiens
tatttcatacgactcactatagggaatttcgccctcgaacggaattcggcacgagcccatttacactgaagatcgatctgaaactcagcaccagcgaaatccagaacttgcctgtctccatggctggttttaatttccccattctgcagtggcttgttaatattagttctgacctttggggcaaggtgaacacatggttggactgaagagaaaaggcttctggtggctcaggaacgtctttggcaactacaacagctgatatttcaacagagcacatacatcccccacttaacaagggtacgtcctcagccttctcagggaaccaacgaacacctccaggcttcctctttgatgccacccactggacctgccttgggggtctgtaaatgcaagagaaccgagtgttggataattagcgatggaagaaaaaacctctagaataaaagcatccataccccagtttaccaattcccccacaatggtgatcatggtgggtttaccagctcgaggcaagacctatatctccacaaagctcacacgatatctcaactggataggaacaccaactaaagtgtttaatttaggccagtatcgacgagaggcagtgagctacaagaactatgaattctttcttccagacaacatggaagccctgcaaatcagggaagcagtgcgccctggcagccctgaaggatgttcacaactatctcagccatgaggaaggtcatgttgcggtttttgatgccaccaacactaccagagaacgacggtcactgatcctgcagtttgcaaaagaacatggttacaaggtgtttttcattgagtccatttgtaatgaccctggcataattgcagaaaacatcaggcaagtgaaacttggcagccctgattatatagactgtgaccgggaaaaggttctggaagactttctaaagagaattgagtgctatgaggtcaactaccaacccttggatgaggaactggacagccacctgtcctacatcaagatcttcgacgtgggcacacgctacatggtgaaccgagtgcaggatcacatccagagccgcacagtctactacctcatgaatatccatgtcacacctcgctccatctacctttgccgacatggcgagagtgaactcaacatcagaggccgcatcggaggtgactctggcctctcagttcgcggcaagcagtatgcctatgccctggccaacttcattcagtcccagggcatcagctccctgaaggtgtggaccagtcacatgaagaggaccatccagacagctgaggccctgggtgtcccctatgagcagtggaaggccctgaatgagattgatgcgggtgtctgtgaggagatgacctatgaagaaatccaggaacattaccctgaagaatttgcactgcgagaccaagataaatatcgctaccgctatcccaagggagagtcctatgaggatctggttcagcgtctggagccagtgataatggagctagaacgacaggagaatgtactggtgatctgccaccaggctgtcatgcggtgcctcctggcctatttcctggataaaagttcagatgagcttccgtatctcaagtgccctctgcacacagtgctcaaactcactcctgtggcttatggctgcaaagtggaatccatctacctgaatgtggaggccgtgaacacacaccgggagaagcctgagaatgtggacatcacccgggaacctgaggaagccctggatactgtcccagcccactactgagccctttccaagaagtcaaactgcctgtgtcctcatcgccttccacctttaggaaatgctatctttgctcttctcctactctgccttggcctcactgaggcaccccacttccagtgaagaagtcctccgcaactcccaaacaagcctcgcttgctggccgcaaccaaggagctatctagctctggaggaaactttctttcttaattcctattctctgacgaataaagacttactgcctacaagagg

SEQ ID NO: 557 - DNA, 2927 bp, Homo sapiens
  modified_base (1316): a, t, c, g, other or unknown
  modified_base (2716): a, t, c, g, other or unknown
gtgggagtggaggaggaagaggcggtagggggtacgggggctggtcccagaagatggcggaggcgggggatttctggtaggtcctactttaggacaagatgtggtaccgttgaagcgtcagtctttgattcacagacagttgagcttttcagctgggaagcctttccattttttttttttaaagggctttctgaacctatgaaaccagggcagaaggagagacagagtcaccggggcccaaaaaggggggcccatatatttcatctgtcactagccagaggggtgaactggagtgatcgaggagtagggctatttttaatgggagtatttctggcattagggttaaatttacttcagattcagagaaaggtgacgctctttccaccgtgagtggtgatggcaagcatcttttcttcggcgtggggggtacccccttgctggggcacggcttctgctgtgattgggttattatacccctgcattgacagacatctaggagaaccacataaatttaaaagagagtggtccagtgtaatgcggtgtgtagcagtctttgttggtataaatcatgccagtgctaaagtggatttcgataacaacatacagttgtctctcacactggctgcactatccattggactgtggtggacttttgatagatctagaagtggttttggccttggagtaggaattgccttcttggcaactgtggtcactcaactgctagtatataatggtgtttaccaatatacatctccagatttcctctatgttcgttcttggttaccatgtatattttttgctggaggcataacaatgggaaacattggtcgacaactggcaatgtacgaatgtaaagttatcgcagaaaaatctcatcaggaatgaagaaggcaaaaaatatcttttgtacagaaaagcaagatgaaaaggatgtgaaatggtagatataccaacaaaacttcagactgtaaaattgccaggatgcagttttccccttgattggcgtgtgtgtatatatggaataaatatatatatacacacacacatattactgcaatctgtgattgcttcatctgtaaatcagttgtaaacctttacatatttgacttaaataactgtaagatatatatgtactacattaaaaagtgttgattaatagatgaaatttttaaattaattttttaaaacatgccatacattgtatcacaatgttaatgtgccaagatattgttcctgtcatgcagagtataagaatgctttgaacaatttgtagacttagtgaaataaaataagaggaaagccaaaaacaaacntacaaaaagcatatggggagctggtattttctctttagcttactgttgtgcctttttatttttctaatcacagcagtatgagttatgagtgccctaatttgtggttagtttctaatttaatgttgtttcatagagtttggagtgttttgatacagggtgaaaatgaacttctggtttcaaacctgcgttactggagacagcccaaagagtaattttctgttttgacaggttttactggaagtatatgtgatgagcagaagaggttatcagcattaaattgttttggttctaaatttggaacagtatatataattaaaagtaaggaacattagaggatttaattagaataaatacatgttttggaaatacagtgacctcttgcagtgtcacaaaagtgcaaagtgatattagctgtcatctgcaatacagaatctcattgcttttgcacatggagcatataggaaactccaaacagatcacaatgaggtttctaaatctgttgggttctgtcttctattgggttctgtgaagcaaaccactgtagctttagctgggttcagtcatatgactcgttggtggaatgcctaggtttttcatcttacatgcagtcttgggggtggatgaatacataatttcttatgtattcgtgtatccattagtgaatagttcaagtctgtttaagagtgtattgagatggcattctctgcatgttaaagatcttaatggcaaccagcacctcttaagtatggtttaaacatattcttagctaattttttccattagtttttgaaattggtggcagttgtctgatccacaagggcaagatcttctgagtactctggggtgtgagtatgtgtgcacacgtgtgtgttggagtgagtgagagaatgtgtctgtgcatgtggccatgctttcctagaatgtcaagtagatatttttacactttgagttttaaagcaattactatcagactgagatcttgtatgccaaactttaatctgcttttatgttttcaggctgaaggtgtgaaaatcctaagaggatttcatattgaatatgtgtacacaatcttaactatcgtggtggaaaacatactactataatttattattatatcttccagataatgttattcatttagaacaaataaggtatattttttagaatcaactttgtaagcactataaaatctttaataagttataaggtctatgatgtgtttactttaaaaattgctgttaaaagcaacacgtattaaatatgtaattatcatctgggttaagagtctgtttttcttctttgtggtaagtcttagaatatggtactgtggattaatctaatgaaattaacatatgtggttgaagttaccaagaaacgatgaaaagaaactaaatatagtngacccttgaacaacaggagttaggggcaccactccccaacatagttgaaaatccatgtataacttttgactcctccaaaacttaactactaatagcctactcttgatgggaagccttaccaataagaaacagttgatgaacacatattgtgtatggtatatgtattatatactgttttcttacaatagtgtaagtctaaggaaaaaaaaaa

SEQ ID NO: 558 - DNA, 5547 bp, Homo sapiens
  modified_base (1984): a, t, c, g, other or unknown
  modified_base (2052): a, t, c, g, other or unknown
  modified_base (5482): a, t, c, g, other or unknown
tcctacaggtgtatcgtcagcgagtggatcgccgagcagggcaactggcaggaaatccaagaaaaggccgtggaagttgccaccgtggtgatccagccgacagatgtatttgtttttaattttcaagttctgcgagcagctgtgcccaagaatgtgtctgtggctgaaggaaaggaactggacctgacctgtaacatcacaacagaccgagccgatgacgtccggcccgaggtgacgtggtccttcagcaggatgcctgacagcaccctacctggctcccgcgtgttggcgcggcttgaccgtgattccctggtgcacagctcgcctcatgttgctttgagtcatgtggatgcacgctcctaccatttactggttcgggatgttagcaaagaaaactctggctactattactgccacgtgtccctgtgggcacccggacacaacaggagctggcacaaagtggcagaggccgtgtcttccccagctggtgtgggtgtgacctggctagaaccagactaccaggtgtacctgaatgcttccaaggtccccgggtttgcggatgaccccacagagctggcatgccgggtggtggacacgaagagtggggaggcgaatgtccgattcacggtttcgtggtactacaggatgaaccggcgcagcgacaatgtggtgaccagcgagctgcttgcagtcatggacggggactggacgctaaaatatggagagaggagcaagcagcgggcccaggatggagactttattttttctaaggaacatacagacacgttcaatttccggatccaaaggactacagaggaagacagaggcaattattactgtgttgtgtctgcctggaccaaacagcggaacaacagctgggtgaaaagcaaggatgtcttctccaagcctgttaacatattttgggcattagaagattccgtgcttgtggtgaaggcgaggcagccaaagcctttctttgctgccggaaatacatttgagatgacttgcaaagtatcttccaagaatattaagtcgccacgctactctgttctcatcatggctgagaagcctgtcggcgacctctccagtcccaatgaaacgaagtacatcatctctctggaccaggattctgtggtgaagctggagaattggacagatgcatcacgggtggatggcgttgttttagaaaaagtgcaggaggatgagttccgctatcgaatgtaccagactcaggtctcagacgcagggctgtaccgctgcatggtgacagcctggtctcctgtcaggggcagcctttggcgagaagcagcaaccagtctctccaatcctattgagatagacttccaaacctcaggtcctatatttaatgcttctgtgcattcagacacaccatcagtaattcggggagatctgatcaaattgttctgtatcatcactgtcgagggagcagcactggatccagatgacatggcctttgatgtgtcctggtttgcggtgcactcttttggcctggacaaggctcctgtgctcctgtcttccctggatcggaagggcatcgtgaccacctcccggagggactggaagagcgacctcagcctggagcgcgtgagtgtgctggaattcttgctgcaagtgcatggctccgaggaccaggactttggcaactactactgttccgtgactccatgggtgaagtcaccaacaggttcctggcagaaggaggcagagatccactccaagcccgtttttataactgtgaagatggatgtgctgaacgccttcaagtatcccttgctgatcggcgtcggtctgtccacggtcatcgggctcctgtcctgtctcatcgggtactgcagctcccactggtgttgtaagaaggaggttcaggagacacggcgcgagcgccgcaggctcatgtcgatggagatggactaggctggcccgggaggggagtgacagagggacgttctaggagcaattgggncaagaagaagcccagtgatatttttaaaacaaagtgtgttacactaaaaaccagtcctctctaatctnaggtgggacttggcgctctctcttttctgcatgtcaagttctgagcgcggacatgtttaccagcacacggctcttcttcccacggcactttctgatgtaacaatcgagtgtgtgttttcccaactgcagctttttaatggttaaccttcatctaattttttttctcccactggtttatagatcctctgacttgtgtgtgtttatagcttttgtttcgcggggttgtggtgaggaaggggtgatggcatgcggagttctttatcttcagtgagaatgtgcctgcccgcctgagagccagcttccgcgttggaggcacgtgttcagagagctgctgagcgccaccctctacccggctgacagacaacacagacctgtgccgaaggctaatttgtggcttttacgaccctaccccaccccctgttttcaggggtttagactacatttgaaatccaaacttggagtatataacttcttattgagcccaactgcttttttatttttatgggattttgggccccttttccatttcttttgtatttgttttctgtgagagcactgaaatggcggccctggaatctacaatttggctctccactgagcaccttatcttgccaccttagccttaagaatgaatatgaagaaaaatacacagccacctctgtccagggcagtaagaagggctgcaaggaaggggaggatggggacaaggaaaggatcagatacctgctccagtagttgtgaggccactgtgtctcaggggactccaggaagagcagaagagggatcccacgaagttatttttatgcagctggggccaggagggtcagagtggtgccaggtgcaagttaggctaaagaagccaccactattcctctgctcttgcccattgtggggggcaaaggcattggtcaccaagagtcttgcagggggacccacagatatgccatgtccttcacacgtgcttgggctccttaacctgaaggcaaattgctacttgcaagactgactgacttcaaggaatcagaaattacctagaagcaccatgttttttctatgaccttttcagtccttcaggtcattttaaggtccactgcagggggttagtgagaaagggtatactttgtggtatgttttgctttcctaatagggacatgaaggaaacccagcaatttgctgttatgtgaatggcctgtagagcagagtcaagagcggtgtgctttgcccgactgctcccatcaggaataggagagtagacagagatcttccacatcccaggcttctgctgctgctttaaaagctctgtccttggagcctcccgctccctgaagtgtctcgccccctgcacagcactggcctttcggaagcatcccagtagggttttctgaggctcgctggtgactcatgccctaattgcaatcctctgcttttatcttgactttgaaggatctaacactgctctctcttccaaaggggaaaaaaagattcatttgttttgagcaataaactaatacaaaatgatggccattcatgtgcagctctttgtcaccatgggccggatgagttgtgctcctcctggctcaccatttccccctgctcccccacagccggttctgcacttatcaccgagtcgcccctggaagcagattcccattgagttttccccaccaaggggaccatgcacatggtagaaacattagattctgcattgacagtagcctttccttgggcccgggcctgtggtgggaagacgggcaacaagtataccccaccagggcctgagtgactagaggaagaggacgaggccttgttggcactagatttgggtattttctgcatgtcataacatatcctaactgctatttcagaagaggcagcttgtaggtgattgtacaagtgagaattaaagagagaacagatatttaaacaggtgctgtattagtaacagccagtgccctttcagcccttgcatctattaaaaggagattcaggattttattggcacaggcccttcttagtaggaagaaagggtgcttagctttggacctgaccgggtgtgtgtaaaaccatggactgagtcacagcagacactcgatggtggtaaatgtgacgggtgcttacacactgtaccttttcctttcatactgatgctgcagttcagggctggagttgttaaggcattgacctccacccacctgccccatgtccgctgggctgcccaagctgcatgtcacctgagggctggcaggaaggggcgagaaatcccagggcattgtaccaaggacctagttccttctagggatataaatttccaggaatgtgtatttttaatgtggtgagatgcactcttttgttgtaccaaatagggctccccaccccacccctgcgacaagtgctcttctagaacaggttcctaccagcagcactggtgtgaatgaaagagagacccagccgcgtctcacacaggtggaattgcacttcttaacaaaaaggaactttataaaagtttgggattttttttcctaatcataaaaatagccccagaaagagcctaagctatgttcagatagaagcctcgaaattcctgtgaattgtttactttatgatgtttacatacacgtttcactttgaaaaaaaatgcaaatcgactttttaacaactgttgagatgtttcatgggacagtagaactctgactcaccaactgggctaaattttaatttaaaaatgtatttatttgagtgtctttccccccctcaccctcaccatctgaggggctccctgagatcttggtagaggaggcccctcctgcccagaccttcgtttgtttccccggtggcccttgcttcttgctttgcagactgcctgcagccatgattttgtcactgacatctgtgagccaaagactgagcctttttggcaggaataataagcaatactacacaacttgctactttcagaaaacttttttttagcttcaccgatgacaacagaggaagaagggaactgggatttgggtaagttctcctccactgtttgaccaaattctcagtgataaatatgtgtgcagatccctagaagagaaaacgttgactttgtttttaagtgtggcacataaggatctgcagaattttccgtagacaaagaaaggatcttgtgtatttttgtccatatccaatgttatatgaactaattgtattgttttatactgtgaccacaaatattatgcaatgcaccatttgggtaagttctcctccactgtttgaccaaattctcagtgataaatatgtgtgcagatccctagaagagaaaacgttgactttctttttaagtgtggcacataaggatctgcagaattttccgtagacaaagaaaggatcttgtgtatttttgtccatatccaatgttatatgaactaattgtattgttttatantgtgaccacaaatattatgcaatgcaccatttgttttttatttcattaaaggaagtttaatttaa

SEQ ID NO: 559 - DNA, 1356 bp, Homo sapiens
aaagaaagaaaaagaaaactgcagataaccctatacattaatactggtatctcgaggtgactcttctgaccaagggtggttaagtgacacatagaacttttctaagagaagacagacaagttgacaggcatgccttgtactcagctgtgttcatgtggtggtctgtggaaagaaaagaagactcatttggaaatgaagctgtccctttccaagcagtctctggtgcttttcttctctcaaaatggatccgataaatatttgaatagagcagattgtagaatgtcgtgctgtcaccagaaagctgctgttttgggttctgcattgagccaaatatgtagaggacctaccaagcccactgagggactaggttttcatgtctctagtcatacctagaatgttctgagccgtctgagggccttcatgccggcagcagctagcaaagccagaaagcaagtctaacaggatctaagatgaccatcaggagaaggagtttgagactgtgtatgcaacccccaatagacccccttttactctgatctggagaatgtatctggcttcatattttcaagtcacatgtctctcagacccctgggattcagaacccaaggccacaaatcataggcatgaagcactttcttaagactgacctaacgctggattatttcccgtccaatgcctgcatgctgcttgaattgctccacccacacctccatgaccaagggcgccagagtgctgcaactggggcgtgggccgctctctgcttttcctgtctgactctgacaagtcctccctcactgaatgtagaatcgttgccaagtttctgagaagtgtcgattccctgttaacatggatatcagttctgcctcacatttcccacttgaggttgaggcgtactggagacaacacctcagaccatctgaaccccatcagtggacgaaaatggggctgttaatatactctaaaagccatactaaaaatgctctgagggaactggctaagaatagtgggcctggtgattgtctatcacgcaaggctttgttttgtactgttcagaaatctgtcacctttctgcctgcccttgtttcctgaatgaaatgcttctggggttatttatgaaaggagtgatcctggggcaggcaggaggcagtgggcttcatggctccttgaagttattactgatcttgaccttctctttggctacctttagacaaagaatacgccaatcaatacttggggctctaagttttacaattgatatttatttgtatcatctctttgtctaggaatgtaaaagtgattctaaactaagatgtgtaataaaaatcaatcagatttattgtacctacaaaaaaaaaa

SEQ ID NO: 560 - DNA, 666 bp, Homo sapiens
gctcaataaacgtttattaagcagtagaatacaagttagtgcctggatcctgatcaccgagttggctgcagatttgtggtgcgttctgagccgtctgtcctgcgccaagatgcttcaaagtattattaaaaacatatggatccccatgaagccctactacaccaaagtttaccaggagatttggataggaatggggctgatgggcttcatcgtttataaaatccgggctgctgataaaagaagtaaggctttgaaagcttcagcgcctgctcctggtcatcactaaccagatttacttggagtacatgtgaaagaaaacgtcagtctgcctgtaaatttcagcaagccgtgttagatggggagcgtggaacgtcactgtacacttgtataagtaccgtttacttcatggcatgaataaatggatctgtgagatgcactgctacctggtactgctttcagtgtgttccccctcagcccctccggcgtgtcaggcatactctgagtagataatttgtcatgcagcgcatgcaatcagaatctcactgagccacccatcattgtgaaataattacctcagttgtacaggacttggtgatcaggatccaggcactcacttgtattctactgctcaataaacgtttattaaacttgatcctgctacttaaa

SEQ ID NO: 561 - DNA, 1994 bp, Homo sapiens
gcggggcgggctcaggaggtccgcgggaggatggagcagtgagcgggtctgggcggctgctggcagcgccatgggagacggtacagctgaggaacccgccgcgccggcagctgaaaaagttggatgaagatagtttaaccaaacaaccagaagaagtatttgatgtcttagagaaacttggagaagggtcctatggcagcgtatacaaagctattcataaagagaccggccagattgttgctattaagcaagttcctgtggaatcagacctccaggagataatcaaagaaatctctataatgcagcaatgtgacagccctcatgtagtcaaatattatggcagttattttaagaacacagacttatggatcgttatggagtactgtggggctggttctgtatctgatatcattcgattacgaaataaaacgttaacagaagatgaaatagctacaatattacaatcaactcttaagggacttgaataccttcattttatgagaaaaatacaccgagatatcaaggcaggaaatattttgctaaatacagaaggacatgcaaaacttgcagattttggggtagcaggtcaacttacagataccatggccaagcggaatacagtgataggaacaccattttggatggctccagaagtgattcaggaaattggatacaactgtgtagcagacatctggtccctgggaataactgccatagaaatggctgaaggaaagcccccttatgctgatatccatccaatgagggcaatcttcatgattcctacaaatcctcctcccacattccgaaaaccagagctatggtcagataactttacagattttgtgaaacagtgtcttgtaaagagccctgagcagagggccacagccactcagctcctgcagcacccatttgtcaggagtgccaaaggagtgtcaatactgcgagacttaattaatgaagccatggatgtgaaactgaaacgccaggaatcccagcagcgggaagtggaccaggacgatgaagaaaactcagaagaggatgaaatggattctggcacgatggttcgagcagtgggtgatgagatgggcactgtccgagtagccagcaccatgactgatggagccaatactatgattgagcacgatgacacgttgccatcacaactgggcaccatggtgatcaatgcagaggatgaggaagaggaaggaactatgaaaagaagggatgagaccatgcagcctgcgaaaccatcctttcttgaatattttgaacaaaaagaaaaggaaaaccagatcaacagctttggcaagagtgtacctggtccactgaaaaattcttcagattggaaaataccacaggatggagactacgagtttcttaagagttggacagtggaggaccttcagaagaggctcttggccctggaccccatgatggagcaggagattgaagagatccggcagaagtaccagtccaagcggcagcccatcctggatgccatagaggctaagaagagacggcaacaaaacttctgagcaaggccaggctgtgagggccccagctccacccaggctttgggtgaattctggatggcttgcctcatgtttgttagccagcacttctgctctgtcgtctctccacagcacctttgtgaactcaggaatgtgcgccagtgggaagggctctcttgacagtcagcgtgccatcttgatgtgtgtatgtacattggtcaggtatattatctcaaaggatttatattggcgcttttaactcagagttttaaaccccaggaacagagactcctagttgagtgatagctgggaaagttttacattgtctgtttttcttctcccaatagctttcaattgttctttctggaagacttttaaaaaaatataaatatgcatatatatatataaattataaaaatacttattaatacaaaaaaagatctttaattaaggagtgcaagcttattccatttagtgagtgtt

SEQ ID NO: 562 - DNA, 541 bp, Homo sapiens
  modified_base (536): a, t, c, g, other or unknown
  modified_base (538): a, t, c, g, other or unknown
agatgttccaggagtagaattcctgactgctgtgtgaaagtgaactgctactccatctctgaaacatatctgagaaacggggcagaaaaccagtgtaaactgctcgtggtgaaattattgaacattgaagtgtgaggcttgtcctaagagcacgtcacctcccttgacacagattctgcatgtccttccctctggtagggatcctccagttccgtttctcaggcgaagtaaccagaggttccagtctgctcttgctttctgggaggaagacagagcacctagtaatagattcccagggtactgattggcaccacacatgactcagaggggacctaagcccatcagcaggctgctctaaggacctacctcagggcactcagacagcctcaccaatcagaggctcaggagagggttttcctcactgccctccttgtgtgcactggtttcctgtttagagcagcatttagcagcaccacacacctcagatgtagaggatgaacctctcttatatgaaataaaatgatgtccagcaaaananaaa

SEQ ID NO: 563 - DNA, 336 bp, Homo sapiens
  modified_base (1): a, t, c, g, other or unknown
  modified_base (12): a, t, c, g, other or unknown
  modified_base (97): a, t, c, g, other or unknown
  modified_base (115): a, t, c, g, other or unknown
  modified_base (168): a, t, c, g, other or unknown
  modified_base (257): a, t, c, g, other or unknown
  modified_base (262): a, t, c, g, other or unknown
  modified_base (305): a, t, c, g, other or unknown
  modified_base (311): a, t, c, g, other or unknown
  modified_base (313): a, t, c, g, other or unknown
nttcggcacggnggctctgcagatccctggaggcttttgggcagcagctgtgaccgtgatgctggtgatgctgagcaccccagtggctgaggcagangactttcccaaggatttnttggtccagtttaagggcatgtgctacttcaccaacgggacagagcgcgtggnggtgtggccagatacatctataaccgcgagagtacgggcgcttcgacagcgacgttggggagttccaggcggtgaccgagctggggcgnacatncgaggactggaacaactataaggacttctttgagcaggagcgngccggntnggacaaggtgtgcagacacaact

SEQ ID NO: 564 - DNA, 1532 bp, Homo sapiens
acgattcttagatgacattttctctttccccttttttccccctaacctcaatctaggctcacttatctaaagaatatgaggaggctaatttcagagctatatgtgcgagataactgccaccctttcaaagccactgtgttggtttggattcagcttccaatgtggatcttcatgtcttttgctctccggaatttaagcacgggggcagcacattcagaagcaggtttttctgttcaggaacagttagctactggtggaattctgtggtttcctgacctcactgcacccgactccacttggattctgcctatctctgttggcgtcatcaatttgttaatagtggagatttgtgctctacaaaaaattggaatgtctcgttttcagacgtatattacgtactttgtccgtgcaatgtcggtgttgatgataccaattgctgcaacggtaccctcatcaattgttctctactggttatgctccagcttcgtgggcctttcacagaatttgctgctgcgttctcctggatttcgccaactttgccgaataccatcgaccaagtcagattcagaaactccttataaagacatatttgctgcctttaataccaagttcatttcaagaaaatgacatattttccaataattttgaaacagttgcaggagtcactatcatctaaatgtatttagacttagaaattcagatgttacttgatttccttttatttatagtcaattgttctctactggttatgctccagcttcgtgagccactgtgcccagctgagatggttcttattattttggaggtggagaggattttagacctctttgagcatctgaaaaaaggctatatatgtatggttttctcttcagaaaaatcttaagactcacaatacggggacttccttgttaccaggaagattttctggcaattcctagttaataaatcttattctaatggaacatacattgatcttgagttaatgcgtggttgaaaaaaaaagcgggggcaacttgaaatatatgcagtaaagtagtccatgcatacaagtccctaacatggtagatgatgttgcctcccggccctgctcagaaagaatacaaaaagtgtacattcctttttctataatttaagaagtctggaatacagagtgtaacactgtgtactgctagcacccaaagtggaaaatcttaagcattcagattgtttagtcaaagaagaaaaccagaagggcagttgcctattgaggtgattttaaacctgtttatttgtaaggattaagtaccctaataggcttaaactatgatagaggtttaatacagaaaaaattgacaggtattataaattgtggatccagttacttgcttatttaatttgtaaagaggtaaaattagctctggttgagatatcaagtatggcaggtatttgagaaggctataaatcataattttcatttagttaaaatatggacctgattctgggaaaccctatcattccatctcaatgttttacaataaaataaaaactaaagt

SEQ ID NO: 565 - DNA, 366 bp, Homo sapiens
  modified_base (15): a, t, c, g, other or unknown
  modified_base (191): a, t, c, g, other or unknown
  modified_base (246): a, t, c, g, other or unknown
  modified_base (251): a, t, c, g, other or unknown
  modified_base (260): a, t, c, g, other or unknown
  modified_base (291): a, t, c, g, other or unknown
  modified_base (308): a, t, c, g, other or unknown
  modified_base (321): a, t, c, g, other or unknown
  modified_base (339): a, t, c, g, other or unknown
aacactttaatattnatggtgtatcacataaaaaacaaagtcatatacttttgcattaatcaaaaaatagcaaatccatataatggcaaaatcaggaaaaaaattctagtatttccacaaaatacataatgtcttacagatgattatgtgaactttaaatgtctgcagccctacagagcttttgttgccanttgaaaaacaaaaaaatcccaacacaggatgttcaaaaagcctaattcataaaangacantttattccnatgtttaatatagtgttttttaggatggtanccataagtcatgcaacnagctctgttaaanccaaaaccaaaaccaagnaacctacggatgtcggctgcgggttta

SEQ ID NO: 566 - DNA, 2136 bp, Homo sapiens
gccgggtgccgctggcacctctatgatcactggagtctcgcgggtccctcgggctgcacagggacaagtaaaggctacatccagatgccgggaatgcactgacgcccattcctggaaactgggctcccactcagcccctgggagcagcagccgccagcccctcgggacctccatctccaccctgctgagccacccgggttgggccaggatcccggcaggctgatcccgtcctccactgagacctgaaaaatggcttcggggcaaggcccaggtcctcccaggcaggagtgcggagagcctgccctgccctctgcttctgaggagcaggtagcccaggacacagaggaggttttccgcagctacgttttttaccgccatcagcaggaacaggaggctgaaggggtggctgcccctgccgacccagagatggtcaccttacctctgcaacctagcagcaccatggggcaggtgggacggcagctcgccatcatcggggacgacatcaaccgacgctatgactcagagttccagaccatgttgcagcacctgcagcccacggcagagaatgcctatgagtacttcaccaagattgccaccagcctgtttgagagtggcatcaattggggccgtgtggtggctcttctgggcttcggctaccgtctggccctacacgtctaccagcatggcctgactggcttcctaggccaggtgacccgcttcgtggtcgacttcatgctgcatcactgcattgcccggtggattgcacagaggggtggctgggtggcagccctgaacttgggcaatggtcccatcctgaacgtgctggtggttctgggtgtggttctgttgggccagtttgtggtacgaagattcttcaaatcatgactcccaagggtgccctttggggtcccggttcagacccctgcctggacttaagcgaagtctttgccttctctgttcccttgcaggggtcccccctcaagagtacagaagctttagcaagtgtgcactccagcttcggagggcccctgcgtgggggccagtcaggctgcagaggcacctcaacattgcatggtgctagtgggccctctctctgggcccaggggctgtggccgtctcctccctcagctctctgggacctccttagccctgtctgctaggcgctggggagactgataacttggggaggcaagagactgggagccacttctccccagaaagtgtttaacggttttagctttttataatacccttgtgagagcccattcccaccattctacctgaggccaggacgtctggggtgtggggattggtgggtctatgttccccaggattcagctattctggaagatcagcaccctaagagatgggactaggacctgagcctggtcctggccgtccctaagcatgtgtcccaggagcaggacctactaggagaggggggccaaggtcctgctcaactctacccctgctcccattcctccctccggccatactgcctttgcagttggactctcagggattctgggcttggggtgtggggtggggtggagtcgcagaccagagctgtctgaactcacgtgtcagaagcctccaagcctgcctcccaaggtcctctcagttctctcccttcctctctccttatagacacttgctcccaacccattcactacaggtgaaggctctcacccccatccctgggggccttgggtgagtggcctgctaaggctcctccttgcccagactacagggcttaggacttggtttgttatatcagggaaaaggagtagggagttcatctggagggttctaagtgggagaaggactatcaacaccactaggaatcccagaggtgggatcctccctcatggctctggcacagtgtaatccaggggtgtagatgggggaactgtgaatacttgaactctgttcccccaccctccatgctcctcacctgtctaggtctcctcagggtggggggtgacagtgccttctctattgggcacagcctagggtcttgggggtcaggggggagaagttcttgattcagccaaatgcagggaggggaggcagatggagcccataggccaccccctatcctctgagtgtttggaaataaactgtgcaatcccctca

SEQ ID NO: 567 - DNA, 3757 bp, Homo sapiens
ggcggctgcggcacgggaaaggctcagtgactgaagctccaaaggccagcaggctggtggggacgtgaccgaagcgaggctctggttccctttcggtgggcgccatttgagcctcatctctggcttccccaggatgcgccggcagccggggagcggctccgggcgcgaggtctgaggatgatctttcctgtcgcccgctacgcgctccggtggctgcgacggcccgaagaccgtgccttttcccgcgccgccatggagatggccctccgaggcgtgcggaaagtcctctgtgtggccgaaaaaaacgacgcggccaaggggatcgccgacctgctgtcaaacggtcgcatgaggcggagagaaggactttcaaaattcaacaagatctatgaatttgattatcatctgtatggccagaatgttaccatggtaatgacttcagtttctggacatttactggctcatgatttccagatgcagtttcgaaaatggcagagctgcaaccctcttgtcctctttgaagcagaaattgaaaagtactgcccagagaattttgtagacatcaagaaaactttggaacgagagactcgccagtgccaggctctggtgatctggactgactgtgatagagaaggcgaaaacatcgggtttgagattatccacgtgtgtaaggctgtaaagcccaatctgcaggtgttgcgagcccgattctctgagatcacaccccatgccgtcaggacagcttgtgaaaacctgaccgagcctgatcagagggtgagcgatgctgtggatgtgaggcaggagctggacctgaggattggagctgcctttactaggttccagaccctgcggcttcagaggatttttcctgaggtgctggcagagcagctcatcagttacggcagctgccagttccccacactgggctttgtggtggagcggttcaaagccattcaggcttttgtaccagaaatcttccacagaattaaagtaactcatgaccacaaagatggtatcgtagaattcaactggaaaaggcatcgactctttaaccacacggcttgcctagttctctatcagttgtgtgtggaggatcccatggcaactgtggtagaggtcagatctaagcccaagagcaagtggcggcctcaagccttggacactgtggagcttgagaagctggcttctcgaaagttgagaataaatgctaaagaaaccatgaggattgctgagaagctctacactcaagggtacatcagctatccccgaacagaaacaaacatttttcccagagacttaaacctgacggtgttggtggaacagcagacccccgatccacgctggggggcctttgcccagagcattctagagcggggtggtcccaccccacgcaatgggaacaagtctgaccaagctcaccctcccattcaccccaccaaatacaccaacaacttacagggagatgaacagcgactgtacgagtttattgttcgccatttcctggcttgctgctcccaggatgctcaggggcaggagaccacagtggagatcgacatcgctcaggaacgctttgtggcccatggcctcatgattctggcccgaaactatctggatgtgtatccatatgatcactggagtgacaagatcctccctgtctatgagcaaggatcccactttcagcccagcaccgtggagatggtggacggggagaccagcccacccaagctgctcaccgaggccgacctcattgccctcatggagaagcatggcattggtacggatgccactcatgcggagcacatcgagaccatcaaagcccggatgtacgtgggcctcaccccagacaagcggttcctccctgggcacctgggcatgggacttgtggaaggttatgattccatgggctatgaaatgtctaagcctgacctccgggctgaactggaagctgatctgaagctgatctgtgatggcaaaaaggacaaatttgtggttctaaggcagcaagtgcagaaatacaagcaggttttcattgaagcggtggctaaagcaaagaaattggacgaggccttggcccagtactttgggaatgggacagagttggcccagcaagaagatatctacccagccatgccagagcccatcaggaagtgcccacagtgcaacaaggacatggtccttaagaccaagaagaatggcgggttctacctcagctgcatgggtttcccagagtgtcgctcagctgtgtggcttcctgactcggtgctggaggccagcagggacagcagtgtgtgtccagtttgtcagccacaccctgtgtacagggttaaagttaaagtttaagcgcggtagccttcccccgaccatgcctctggagtttgtttgctgcatcggcggatgcgacgacaccctgagggagatcctggacctgagattttcagggggcccccccagggctagccagccctctggccgcctgcaggctaaccagtccctgaacaggatggacaacagccagcacccccagcctgctgacagcagacagactgggtcctcaaaggctctggcccagaccctcccaccacccacggctgctggtgaaagcaattctgtgacctgcaactgtggccaggaggctgtgctgctcactgtccgtaaggagggccccaaccggggccggcagttctttaagtgcaacggaggtagctgcaacttcttcctgtgggcagacagccccaatccgggagcaggagggcctcctgccttggcatatagacccctgggcgcctccctgggatgcccaccaggcccagggatccacctaggtgggtttggcaaccctggtgatggcagtggtagtggcacatcctgcctttgcagccagccctccgtcacacggactgtgcagaaggatggacccaacaaggggcgccagttccacacatgtgccaagccgagagagcagcagtgtggctttttccagtgggtcgatgagaacaccgctccagggacttctggagccccgtcctgggacaggagacagaggaagaaccctggagtcggaagccagaagcaaaaggccccgggccagttcctcagacatggggtccacagcaaagaaaccccggaaatgcagcctttgccaccagcctggacacacccgtcccttttgtcctcagaacagatgagctcagggtagggtagagaacgccactttctcagacctgtcccctttgtgtttagaaatgagttaaccaggaccaagtggccatttagtgtcctggaaacttagaggacagtgttggcctttggagtcgggccttcttgtgttaaggggcacaaggtccagatcactctggagcaggccagctctgctggacagtgaccctcttcccaggcctcaggagtgaccatagccactgctgaaaagtcacgcagctgctccctcggaccccccaaggatggttgctgttagcagaggattggtgcagtcccagctgaagcccactgtgtgccaaaggaagaagctcccagggctgcttccttcacctgcagaaagccccaagtgagccaccagcactcatggggtagtccctgtccaggctgcccagggcttctcatagacgtcctgagaaggacggtgtaatgcaaggaaatggctgtggtaacactgatccttcagaagaagcttcattccctcttaatctagttaagccaggacatccagaattcattgctttaataaagaacccaggccggg

SEQ ID NO: 568 - DNA, 2782 bp, Homo sapiens
ggagccgtcaccccgggcggggacccagcgcaggcaactccgcgcggcgcccggccgagggagggagcgagcgggcgggcgggcaagccagacagctgggccggagcagccgccggcgcccgaggggccgagcgagattgtaaaccatggctgtgtggatacaagctcagcagctccaaggagaagcccttcatcagatgcaagcgttatatggccagcattttcccattgaggtgcggcattatttatcccagtggattgaaagccaagcatgggactcagtagatcttgataatccacaggagaacattaaggccacccagctcctggagggcctggtgcaggagctgcagaagaaggcagagcaccaggtgggggaagatgggtttttactgaagatcaagctggggcactatgccacacagctccagaacacgtatgaccgctgccccatggagctggtccgctgcatccgccatatattgtacaatgaacagaggttggtccgagaagccaacaatggtagctctccagctggaagccttgctgatgccatgtcccagaaacacctccagatcaaccagacgtttgaggagctgcgactggtcacgcaggacacagagaatgagttaaaaaagctgcagcagactcaggagtacttcatcatccagtaccaggagagcctgaggatccaagctcagtttggcccgctggcccagctgagcccccaggagcgtctgagccgggagacggccctccagcagaagcaggtgtctctggaggcctggttgcagcgtgaggcacagacactgcagcagtaccgcgtggagctgcccgagaagcaccagaagaccctgcagctgctgcggaagcagcagaccatcatcctggatgacgagctgatccagtggaagcggcggcagcagctggccgggaacggcgggccccccgagggcagcctggacgtgctacagtcctggtgtgagaagttggcggagatcatctggcagaaccggcagcagatccgcagggctgagcacctctgccagcagctgcccatccccggcccagtggaggagatgctggccgaggtcaacgccaccatcacggacattatctcagccctggtgaccagcacgttcatcattgagaagcagcctcctcaggtcctgaagacccagaccaagtttgcagccactgtgcgcctgctggtgggcgggaagctgaacgtgcacatgaaccccccccaggtgaaggccaccatcatcagtgagcagcaggccaagtctctgctcaagaacgagaacacccgcaatgattacagtggcgagatcttgaacaactgctgcgtcatggagtaccaccaagccacaggcacccttagtgcccacttcaggaatatgtccctgaaacgaattaagaggtcagaccgtcgtggggcagagtcggtgacagaagaaaaatttacaatcctgtttgaatcccagttcagtgttggtggaaatgagctggtttttcaagtcaagaccctgtccctgccagtggtggtgatcgttcatggcagccaggacaacaatgcgacggccactgttctctgggacaatgcttttgcagagcctggcagggtgccatttgccgtgcctgacaaagtgctgtggccacagctgtgtgaggcgctcaacatgaaattcaaggccgaagtgcagagcaaccggggcctgaccaaggagaacctcgtgttcctggcgcagaaactgttcaacaacagcagcagccacctggaggactacagtggcctgtctgtgtcctggtcccagttcaacagggagaatttaccaggacggaattacactttctggcaatggtttgacggtgtgatggaagtgttaaaaaaacatctcaagcctcattggaatgatggggccattttggggtttgtaaacaagcaacaggcccatgacctactgattaacaagccagatgggaccttcctcctgagattcagtgactcagaaattggcggcatcaccattgcttggaagtttgattctcaggaaagaatgttttggaatctgatgccttttaccaccagagacttctccatcaggtccctagccgaccgcttgggagacttgaattaccttatctacgtgtttcctgatcggccaaaagatgaagtatactccaaatactacacaccagttccctgcgagtctgctactgctaaagctgttgatggatacgtgaagccacagatcaagcaagtggtccctgagtttgtgaacgcatctgcagatgccgggggcggcagcgccacgtacatggaccaggccccctccccagctgtgtgtccccaggctcactataacatgtacccacagaaccctgactcagtccttgacaccgatggggacttcgatctggaggacacaatggacgtagcgcggcgtgtggaggagctcctgggccggccaatggacagtcagtggatcccgcacgcacaatcgtgaccccgcgacctctccatcttcagcttcttcatcttcaccagaggaatcactcttgtggatgttttaattccatgaatcgcttctcttttgaaacaatactcataatgtgaagtgttaatactagttgtgaccttagtgtttctgtgcatggtggcaccagcgaagggagtgcgagtatgtgtttgtgtgtgtgtgtgtgtgtgtgtgtgtgtgcgttggtgcacgttatggtgtttctccctctcactgtctgagagtttagttgtagcaga

SEQ ID NO: 569 - DNA, 2111 bp, Homo sapiens
  modified_base (1428): a, t, c, g, other or unknown
  modified_base (1430): a, t, c, g, other or unknown
gaagcggtggtggtgggcgtcgtggcatggcggcggctatcgccagctcgctcatccgtcagaagaggcaagcccgcgagcgcgagaaatccaacgcctgcaagtgtgtcagcagccccagcaaaggcaagaccagctgcgacaaaaacaagttaaatgtcttttcccgggtcaaactcttcggctccaagaagaggcgcagaagaagaccagagcctcagcttaagggtatagttaccaagctatacagccgacaaggctaccacttgcagctgcaggcggatggaaccattgatggcaccaaagatgaggacagcacttacactctgtttaacctcatccctgtgggtctgcgagtggtggctatccaaggagttcaaaccaagctgtacttggcaatgaacagtgagggatacttgtacacctcggaacttttcacacctgagtgcaaattcaaagaatcagtgtttgaaaattattatgtgacatattcatcaatgatataccgtcagcagcagtcaggccgagggtggtatctgggtctgaacaaagaaggagagatcatgaaaggcaaccatgtgaagaagaacaagcctgcagctcattttctgcctaaaccactgaaagtggccatgtacaaggagccatcactgcacgatctcacggagttctcccgatctggaagcgggaccccaaccaagagcagaagtgtctctggcgtgctgaacggaggcaaatccatgagccacaatgaatcaacgtagccagtgagggcaaaagaagggctctgtaacagaaccttacctccaggtgctgttgaattcttctagcagtccttcacccaaaagttcaaatttgtcagtgacatttaccaaacaaacaggcagagttcactattctatctgccattagaccttcttatcatccatactaaagccccattatttagattgagcttgtgcataagaatgccaagcattttagtgaactaaatctgagagaaggactgccaaattttctcatgatctcacctatactttggggatgataatccaaaagtatttcacagcactaatgctgatcaaaatttgctctcccaccaagaaaatgtaaaagaccacaattgttcttcaaaaacaaacaaaacaaaacaaaacaaaattaactgcttaaatgttttgtcggggcaaacaaaattatgtgaattgtgttgttttcttggcttgatgttttctatctacgcttgattcacatgtactcttttctttggcatagtgcaactttatgatttctgaaattcaatggttctattgactttttgcgtcacttaatccaaatcaaccaaattcagggttgaatctgaattggcttctcaggctcaaggtaacagtgttcttgtggtttgaccaattgtttttctttctgttntnttttttttagatttgtggtattctggtcaagttattgtgctgtactttgtgcgtagaaattgagttgtattgtcaaccccagtcagtaaagagaacttcaaaaaattatcctcaagtgtagatttctcttaattccatttgtgtatcatgttaaactattgttgtggcttcttgtgtaaagacaggaactgtggaactgtgatgttgtcttttgtgttgttaaaataagaaatgtcttatctgtatatgtatgagtcttcctgtcattgtatttggcacatgaatattgtgtacaaggaattgttaagactggttttccctcaacaacatatattatacttgctactggaaaagtgtttaagacttagctaggtttccatttagatcttcatatctgttgcatggaagaaagttgggttcttggcatagagttgcatgatatgtaagattttgtgcattcataattgttaaaaatctgtgttccaaaagtggacatagcatgtacaggcagttttctgtcctgtgcacaaaaagtttaaaaaagttgtttaatatttgttgttgtatacccaaatacgcaccgaataaactctttgaatgaatataaagagtttattcggtgcgtatttgttgttgtatacccaaatacgcaccgaataaactctttatattgattcaaag

SEQ ID NO: 570 - DNA, 1896 bp, Homo sapiens
ggtggcaggtgacgggttaggcccagccccctctgggcctagccactcaggtacgaggcctttcccccccatcccccggggctgggatctcttttataaaaggccattcctgagagctctcctcaccaagcagcagcttctccgctccttctaggatctccgcctggttcggcccgcctgcctccactcctgcctccaccatgtccatcagggtgacccagaagtcctacaaggtgtccacctctggcccccgggccttcagcagccgctcctacacgagtgggcccggttcccgcatcagctcctcgagcttctcccgagtgggcagcagcaactttcgcggtggcctgggcggcggctatggtggggccagcggcatgggaggcatcaccgcagttacggtcaaccagagcctgctgagcccccttgtcctggaggtggaccccaacatccaggccgtgcgcacccaggagaaggagcagatcaagaccctcaacaacaagtttgcctccttcatagacaaggtacggttcctggagcagcagaacaagatgctggagaccaagtggagcctcctgcagcagcagaagacggctcgaagcaacatggacaacatgttcgagagctacatcaacaaccttaggcggcagctggagactctgggccaggagaagctgaagctggaggcggagcttggcaacatgcaggggctggtggaggacttcaagaacaagtatgaggatgagatcaataagcgtacagagatggagaacgaatttgtcctcatcaagaaggatgtggatgaagcttacatgaacaaggtagagctggagtctcgcctggaagggctgaccgacgagatcaacttcctcaggcagctgtatgaagaggagatccgggagctgcagtcccagatctcggacacatctgtggtgctgtccatggacaacagccgctccctggacatggacagcatcattgctgaggtcaaggcacagtacgaggatattgccaaccgcagccgggctgaggctgagagcatgtaccagatcaagtatgaggagctgcagagcctggctgggaagcacggggatgacctgcggcgcacaaagactgagatctctgagatgaaccggaacatcagccggctccaggctgagattgagggcctcaaaggccagagggcttccctggaggccgccattgcagatgccgagcagcgtggagagctggccattaaggatgccaacgccaagttgtccgagctggaggccgccctgcagcgggccaagcaggacatggcgcggcagctgcgtgagtaccaggagctgatgaacgtcaagctggccctggacatcgagatcgccacctacaggaagctgctggagggcgaggagagccggctggagtctgggatgcagaacatgagtattcatacgaagaccaccagcggctatgcaggtggtctgagctcggcctatgggggcctcacaagccccggcctcagctacagcctgggctccagctttggctctggcgcgggctccagctccttcagccgcaccagctcctccagggccgtggttgtgaagaagatcgagacacgtgatgggaagctggtgtctgagtcctctgacgtcctgcccaagtgaacagctgcggcagcccctcccagcctacccctcctgcgctgccccagagcctgggaaggaggccgctatgcagggtagcactgggaacaggagacccacctgaggctcagccctagccctcagcccacctggggagtttactacctggggaccccccttgcccatgcctccagctacaaaacaattcaattgctttttttttttggtccaaaataaaacctcagctagctctgccaatgtcaaa

SEQ ID NO: 571 - DNA, 238 bp, Homo sapiens
gtttggggacgtctgcccgccctctttcccttcacatttcattgcatgggttccccaacagcgttccctggttcttctttgtgaccccagtcaatgtcctgcctcccccggctcccgctctctcgcccctggtctgcggcgttctctccggaatcttgccctgggccgcggacgcccaggaaaagagccgggtgccccaggcagcctcgcgttgggggcgaccgcgccatcccgggaa

SEQ ID NO: 572 - DNA, 2021 bp, Homo sapiens
gggcggtgactggcccagccgcaccgcgtctcccgccttctccgcagccccgcaggccccgggccctgtcattcccagcgctgccctgtcttgcgttccagtgttccagcttctgcgagatgaccctcaaggcgagcgagggcgagagtgggggcagcatgcacacggcgctctccgacctctacctggagcatttgctgcagaagcgtagtcggccagaggctgtatcgcatccattgaatactgtgaccgaggacatgtacaccaacgggtctcctgccccaggtagccctgcccaggtcaagggacaggaggtgcggaaagtgcgactcatacagtttgagaaggtcacagaagagcccatgggaatcacgctgaagctgaatgaaaaacagtcctgtacggtggccagaattcttcatggtggcatgatccatagacaaggctcccttcacgtgggggatgagatcctagaaatcaatggcacaaatgtgacaaatcattcagtggatcagctgcagaaggcgatgaaagaaaccaaaggaatgatctcattaaaagtaattcccaaccagcaaagccgtcttcctgcactacagatgttcatgagagcgcagtttgactatgatcccaaaaaggacaatctgatcccttgcaaggaggcgggactgaagtttgctactggggacattatccagattatcaacaaggatgacagcaattggtggcagggacgggtggaaggctcctccaaggagtcagcaggattgatcccttcccctgagctgcaggaatggcgagtggcaagtatggctcagtcagctcctagcgaagccccgagctgcagtccctttgggaagaagaagaagtacaaagacaaatatctggccaagcacagctcgatttttgatcagttggatgttgtttcctacgaggaagtcgttcggctccctgcattcaagaggaagaccctggtgctgatcggagccagtggggtgggtcgcagccacattaagaatgccctgctcagccagaatccggagaagtttgtgtaccctgtcccatatacaacacggccgccaaggaagagtgaggaagatgggaaggagtaccactttatctcaacggaggagatgacgaggaacatctctgccaatgagttcttggagtttggcagctaccaaggcaacatgtttggcaccaaatttgaaacagtgcaccagatccataagcagaacaagattgccatccttgacattgagccccagaccctgaaaattgttcggacagcagaactttcgcctttcattgtgttcattgcacctactgaccagggcactcagacagaagccctgcagcagctgcagaaggactctgaggccatccgcagccagtacgctcactactttgacctctcactggtcaataatggtgttgatgaaacccttaagaaattacaagaagccttcgaccaagcgtgcagttctccacagtgggtgcctgtctcctgggtttactaagcttgtagaatgggggaacccactgtatgcccctctccagcatttggaattccacccgccttgctttaagacaaacagggctgctccaactagttttgtgtcagcttccagctctctgcagctatcctaattcagccagtaaggttcagtcttcttgctcaggctcctgaagggttgattctcctgatagatggggccccactgatctggatttgaaaaggatttctagaaattgggggtaagaagtactaccaaaatgtaactgctaatcaagggtgatgcacagcaaaagcaatggaccccatccctctaaagcctgccctcctttgccttcaactgtatatgctgggtatttcatttgtctttttattttggagaaagcgtttttaactgcaactttctataatgccaaaatgacacatctgtgcaatagaatgatgtctgctctagggaaaccttcaaaagcaataaaaatgctgtgttgaaatgccagaaaaaaaa

SEQ ID NO: 573 - DNA, 238 bp, Homo sapiens
  modified_base (160): a, t, c, g, other or unknown
  modified_base (167): a, t, c, g, other or unknown
  modified_base (193): a, t, c, g, other or unknown
  modified_base (207): a, t, c, g, other or unknown
  modified_base (227): a, t, c, g, other or unknown
ttttttcgggagaagaaaagctttactgggagaaaatacaacaaattccagagtgcatggtttttagcccaccctatcaccccaccagcaataggaacacagaccactcgatcaccacacattccctacctcagggagtaagtacatcagccaacatctnggtctcngagctgctgggaaaaggggcaggagnaagaagtatctggnaataccattctctcactctnttcccctcctt

SEQ ID NO: 574 - DNA, 1257 bp, Homo sapiens
gtcctggagctggagcgcttcctgccccagcccttcaccggcgagatccgcggcatgtgtgacttcatgaacctcagcctggcggactgccttctggtcaacctggcctacgagtcctccgtgttctgcaccagtattgtggctcaagactccagaggccacatttaccatggtcggaatttggattatccttttgggaatgtcttacgcaagctgacagtggatgtgcaattcttaaagaatgggcagattgcattcacaggaactacttttattggctatgtaggattatggactggccagagcccacacaagtttacagtttctggtgatgaacgagataaaggctggtggtgggagaatgctatcgctgccctgtttcggagacacattcccgtcagctggctgatccgcgctgtggttccgagttgagacaaattacgaccactggaagccagcacccaaggaagatgaccggagaacatctgccatcaaggcccttaatgctacaggacaagcaaacctcagcctggaggcacttttccagattttgtcggtggttccagtttataacaaatgattttttaaaaaatgaaattcttgaagagctgcaccttaaaaaataagacaaagtgaaagtattgtattatgttacaaacaatgcaggctccttcctcatttaactttacaaccttgcgaagtgggtccaggagatttggagtttgtggtaaagccagtaatgggcattgtcctgcattcccttcccttcatggtttgcctcgatcctctctaagcttctatcctggcctgaataactcaaagataattggtctcagagatcaagccatatcctcaggccttatttccatcttctcatgattctgccatcatacctttgcttctccgctaatgaaatgagctggcaagacctctgttcattgtgaagtgcttctgaaagagcctaagaaaaaaggctcatctgaaagaaatggagaactctatttcgaaccaagcctgtttgaatgtgtgttagtctgatctttgatcatgtgtttccatgtaatgggagtctcgttttttataatgtttctaacgttttattgaaaaacctatggccctccttctttctcaatagctactttcttactgctttttgaaaataatatgcaaccaaattatttcttaatgtcacataattaagtaataaaatgtcaaaagaaatgttggcaaggagaataaaaaaatttccaagaaaaa

SEQ ID NO: 575 - DNA, 1046 bp, Homo sapiens
gaccggggcgtgcggagggatgtggcccggaatattggtagggggggcccgggtggcgtcatgcaggtaccccgcgctggggcctcgcctcgccgctcactttccagcgcagcggccgccgcagcgtacactccagaacggcctggccctgcagcggtgcctgcacgcgacggcgacccgggctctcccgctcattcccatcgtggtggagcagacgggtcgcggcgagcgcgcctatgacatctactcgcggctgctgcgggagcgcatcgtgtgcgtcatgggcccgatcgatgacagcgttgccagccttgttatcgcacagctcctcttcctgcaatccgagagcaacaagaagcccatccacatgtacatcaacagccctggtggtgtggtgaccgcgggcctggccatctacgacacgatgcagtacatcctcaacccgatctgcacctggtgcgtgggccaggccgccagcatgggctccctgcttctcgccgccggcaccccaggcatgcgccactcgctccccaactcccgtatcatgatccaccagccctcaggaggcgcccggggccaagccacagacattgccatccaggcagaggagatcatgaagctcaagaagcagctctataacatctacgccaagcacaccaaacagagcctgcaggtgatcgagtccgccatggagagggaccgctacatgagccccatggaggcccaggagtttggcatcttagacaaggttctggtccaccctccccaggacggtgaggatgagcccacgctggtgcagaaggagcctgtagaagcagcgccggcagcagaacctgtcccagctagcacctgagagctgggcctcctctccagaatcatgtggaggggccagaggcctgccagacccccagctgggccctgctcaccccttgttgctgggcttggaggggcctcttgaggaacttttaatttgcaggggtgcccgctatggacggggcattccagctgagacactgtgattttaaattaaatctttgtggtctttg

SEQ ID NO: 576 - DNA, 711 bp, Homo sapiens
  modified_base (555): a, t, c, g, other or unknown
  modified_base (580): a, t, c, g, other or unknown
  modified_base (593): a, t, c, g, other or unknown
  modified_base (604): a, t, c, g, other or unknown
  modified_base (615): a, t, c, g, other or unknown
  modified_base (629): a, t, c, g, other or unknown
  modified_base (655): a, t, c, g, other or unknown
  modified_base (667): a, t, c, g, other or unknown
  modified_base (673): a, t, c, g, other or unknown
  modified_base (702): a, t, c, g, other or unknown
ttcaagtacatcataatcggcgacacaggtgttggtaaatcatgcttattgctacagtttacagacaagaggtttcagccagtgcatgaccttactattggtgtagagttcggtgctcgaatgataactattgatgggaaacagataaaacttcagatatgggatacggcagggcaagaatcctttcgttccatcacaaggtcgtattacagaggtgcagcaggagctttactagtttacgatattacacggagagatacattcaaccacttgacaacctggttagaagatgcccgccagcattccaattccaacatggtcattatgcttattggaaataaaagtgatttagaatctagaagagaagtaaaaaaagaagaaggtgaagcttttgcacgagaacatggactcatcttcatggaaacgtctgctaagactgcttccaatgtagaagaggcatttattaatacagcaaaagaaatttatgaaaaaattcaagaaggagctttgacattaataatgaggccaatggcattaaaattggccctcagcatntgttaccatgccacacatgcaggcnatcagggaggcancagctggggcngctctgttgantctgtttatgctantgccacgggcttctcccttatcttanccttcctctggnactggntgacctttgaaaggtttgccagagattanccgcaatct

SEQ ID NO: 577 - DNA, 497 bp, Homo sapiens
  modified_base (17): a, t, c, g, other or unknown
  modified_base (458): a, t, c, g, other or unknown
  modified_base (494): a, t, c, g, other or unknown
aatattttcagcttcanccatgttgttggagatggaaagatggaagcaggacagagaaactggtcgattttcaaggccctgtgagtgcctcgtcgtgcgtgtggccccagacctcggagaaaggatcacgctaagcggtgacaaatccttgatagaagaagtatttccagagatccggcgacgtgatgtgtaactctgtcaatgcaggctggaatcacgactcgacgcacgtcatcaggtttccactaaatggctactgtcacctcaactcagtccaaggtcctcgagaggttgcaagcaaagaaggatttgaaatccgtgggctcctgtgggggaggagtagactccgtcccaagttcagccgaatacgtccttcggcgggaacttgaggcggaccccccgtgtaccctccgtcatcccggataaagcaaagagcctctggactaaaatggacatanttctttaatgcaaaaaaggaaaacacacacaaaccnatt

SEQ ID NO: 578 - DNA, 1373 bp, Homo sapiens
aagaccactagattttctggatttagaaagacctcctacaacccctcaaaatgaagaaatccgagcagttggcagactaaaaagagagcggtctatgagtgaaaatgctgttcgccaaaatggacagctggtcagaaatgattctctgtggcacagatcagattctgccccaagaaataaaatttcaaggttccaggcaccgatttctgcaccggagtacactgtgacaccatcgccacaacaggctcgggtctgtcctccccatatgttacctgaagatggagctaatctttcctctgctcgtggcattttgtcgcttatccagtcttctactcgtagggcataccagcagatcttggatgtgctggatgaaaatcgcagacctgtgttgcgtggtgggtctgctgccgccacttctaatcctcatcatgacaacgtcaggtatggcatttcaaatatagatacaaccattgaaggaacgtcagatgacctgactgttgtagatgcagcttcactaagacgacagataatcaaactaaatagacgtctacaacttctggaagaggagaacaaagaacgtgctaaaagagaaatggtcatgtattcaattactgtagctttctggctgcttaatagctggctctggtttcgccgctagaggtaacatcagccctcaaaaatactgtctcaacagctggaaatataaaagatttgcaaacttctttgtttctgtctctgcattgtatgccattttatagtccacaccctgaaaatgtatttcttccagaaagtctggaggaaggacctatatttgtagaagtaaaggtatattctgtcactcagctgtattcacgtctgagcagttctgcagtaacacctgcttaaaattctccctttgcatgttttgtaaataggctccagttttgttttttaaaaggaatttattttttgcctcatcagtccacccaactgattctgaatgggagagagtctgtagagaattgattcagaaaagtgtctgtgaaagaaaaacaattattttgtcctgtttctcaaacagtgttaagcagttttgttaatagacatttttgcatcgacacttcaacattaacactttgaaagtcatggtctggtgccagatttaagaaactcgaaccacctaatatttcataaccttcttcattaggtacttgtacagattaatttctaacattgcagcagtttcatatgtgtgcaatatgtgcattctttcattttagttttgcacttggttttctataaagtacgtttttactcagttcatgcgtgaacaatttaaaaaacgacagaataaggtacaaatgtagtgtatttaataaactgtcaaccaaaga

SEQ ID NO: 579 - DNA, 1910 bp, Homo sapiens
  modified_base (1340)..(1412): a, t, c, g, other or unknown
ctttttttattttttatctctatgcttaatagaaaacatatttttattccgtactttaaaaatatagactttctagcaacttataaatttctattataataataaattgatactttgagccaagaaaacaatataaccaaaaattcatttgttccctttgtttaggggtgttttacatttatgcataattttgcttttataaaagatgattgttacaatcaggtatacaactacttggttatgtctaagttctgtctcttaaaatatgttcttttagagaattcatttaatcatcttattcttttcttcaattttctccaaacagtggtagaagtactatttgatagacagaataaagaaaattgtttttggccacacccagatcatactgatatctacagcatagtcctggctacaggggagctcaactctaactcgtgaagcgggcctggtttagaaagtaacaatgaggtagtaactcatgatagtgctagctgttatcaaaaattaacaactttaggtatttttgttttgggtttttgcggtttaggtacatccaaaatttcttcatagtctgcactcattccctttgcccagcgaccaactgtgaccattcgctctgaattctgactttcagggcaatctttctttaaatgttccacagagccacaaagtttgcaaccgccaccatcagcatagagtcctttgggattatcaggacaagatctagacaggtgccccatttctccacaaacaaaacattttgcaaaaggaaattcgcctgtaaaaatcaacagttcctattcagttgacaatacatatggcaagtcataaaattaacattattttaaaatactctgaataaaaaatatatttacataacttaaaatttaatctcatatgatttccaaatactaagtggcacactcgtaacaaattgtgttaaaaaaatacccaaggtgctatttattggctttccccatgaacaaaacaaaaaactgaaagaaacacataccaagagccgggtctactttagccttacacttggttatttcgtgctctgtggacccacacctgtaacatatcccagtgcccatgtcttgattttcaagggcggcggggcaatctgcaattccatgaccaggttttctacaatggaaacacaccattgcatttttctttgccgcttgtctttttaatcttctccttcccgtcgactgtctttctttaaagcaactgcaatttcttcccttacttcctcactgtctgttgctataatttgcccattgtgaaccatctgtgaattctgtcttaggtattccatgaatccattcacatcnnnnnnnnnnnnnnnnnnnnnnnnnnnnnnnnnnnnnnnnnnnnnnnnnnnnnnnnnnnnnnnnnnnnnnnnnctattggcttcaagttgtttacgctttggtaggttttggcttgttccctcaaaggatcccttcttcatgtcctcccatgatgttgcaggcaagggtctcttgttatatgtggtactaactcgggcccacctggtcataatttcatcagtggtaccttatcaatttttaagacaagcatgggtggttagccatcaacaacaaaaacaacaaaactaaagagacatgctatatcactatatgtcacatatgcccatatgttaaacttttaattattaaaacactttttatttcagttagatatctgtatacatatttaatgctataatatgctgcatagacatgcttctaacataaatctaccacttaccagaaaagctgccacaccagttaaaaaaggtgtgcttaaaattgaaaaactatcttaagaaaccaaattatttcataaaatataaatcagatagtaatacaatgaatgcaattattcctcccacattctgc

SEQ ID NO: 580 - DNA, 515 bp, Homo sapiens
caatgatatatttattgtgtaaatcttaaaattttttaaaaacaattcttaaatacaaatctgttaaagaaaaaaaaaagatggtaagcataaaaaagttcttttatgcccaaagtccaatttgaggcagtttacattatggctaaatctttcagtctcaagactcagccaaggttgtgaggttgcatttgatcatgcatttgaaacaagttcatacggtgattgctcaggacatttctgttagaaggaatcgttttccttacttttccttacgcacaagagttccgtagctgttcaagtttcgtgtttcaactgttctcgtcgtttccgcaacaagtcctcttcagaaatgagcttttgctcctctgcttggacggacaggatgtatgctgtggcttttttaaggataactaccttgggggccttttcattgttttccaactccgggatctgggtcacgcagggcaaaaaagctccgttttaagctcgttcctcctctgggcgctcctcgtgcc

SEQ ID NO: 581 - DNA, 4291 bp, Homo sapiens
  modified_base (4073): a, t, c, g, other or unknown
  modified_base (4248): a, t, c, g, other or unknown
  modified_base (4251): a, t, c, g, other or unknown
  modified_base (4254)..(4255): a, t, c, g, other or unknown
  modified_base (4258): a, t, c, g, other or unknown
ttcacatggccgttataacgacgcgcgtcgtggccgttcgtatttacaacgtcgtgactggaaaacagtgtaattctaagcacctctttcagtattcaagtcaaacaacgtgaaataggatgggtgtaaagcatactggtccaaatagtcctgacacggccaatgatggcttagtacggcttaagaggactaccctataggatgtagcaaggaagaaattgtacagttctatctacaggtatgtagtcatagttagttgctagagcagtgagtataaaggctagcttatggcaaggtgatttaatagacgttaaagttgagtagcttaggtatttcagtaggttgtaaatatgccaatgaattaatgtttacttcctagagaccttcaaataatttaagcccatcttaaaggtggaaatgaagtactatccaaaatgttaactttgcctatatttagtattatagttcagagtagatctttcattgaggattgccctcaacagcttaactactttcctcacattggtgtccagctaagtacctcaagttaaaggtaagatccctttaccagcagatcatcagtgcgatgaattaggttgttgtaaattatggcaagtgtctgtgttgcaagacacacgtatttgggtcatgtgaccagaagcatctaatggtctaattctctttaatgcaaaagtcggtttatgaaagacttggtttaacctgtgtggtataacttactgaaaatcagatgtagtgagagtagtttgaatgcttgtagtctcagtatctgaaataagtgttttgaaattgttcctgggcctaaagtatttgaatgtttttatgctgaagagctgataagattgcatgtttaacaatgttagataagatatcgtatatttgaagtattaatattgatgaggtgatacactggaagcaagaaatcctttcatggtttagtgtagtatgttaaaaattgatatatgtatcgagtcctaatgtcagaatttttaaaatcaagtctgttttgttttgacactaaattggtgagaattgaatgctgtcaacgttaaatatgaacataatttcatatcttctaggaaagtgctttaagtcctttttgtaagcttgggaatgtatccacggaaaggatttttcatagacggaatttccagaagtgaatcataactactgttagagcataagcatgcatgattgtgctgtgtagatcagttttgttgaaagtttagattgttgtgtttgtcaattataatttaatgtttcagtttttatatgaaatgttgtaaatgtatacctttttaaaaacttgaagttccaataacttaaagcattgaaatataaaatgaggtaaaaggtgttttgaatttagtaaaactgttatttaatgcttaaaacttaattgaattgtataattctcaacattaagttgcatagatatgtgttcttaagttgttgaattcttaatgcatcctgtgttcagcaagttttttttaatatatactgtaccatgggtgtgttaagaatagttatactttataataatggaacttcatattattgcaatgcatatttaaagagtacttgttgaaagcataccattcacctaaagttaaaaattctggtttatttaaagctataagaagaatcatttctgggcttgtgatgttaatattgcccccctactggggttatttgtccttgggttgaagggttggaaatcgtgccaaatgggataacattgccggtggacttccaggggaggagtacgggggaggccttcgtgcagtttgcttcacaggaaatagctgaaaaggctctaaagaaacacaaggaaagaatagggcacaggtggggatggatggttggttggatatgtcacttttcttatggtaaacaattaaatccatattctctctgcttaaaagaagaaattaatgttttgtagtcctaggtaattgatgttttgccatgatttccaaacttgtgtcagtcccacgttacacgcaaactaaattttaggtttgaaatttgtccctagttaattggtctgcttgacaattttgtgagtcttattaaccccaatcaatagagttgagagactatggctttaaaaaattaatgcaaacctggctttagctgtaataacacccacctagaataaattaatattaccataagaaaatgtgatactttctgatcttgtttttaaagttgaaatgcaacaaactttttcttgctgtatataaatattctgcatagtattaataagcatagctttcaagaaattgtcacaaaaggttttattctctttgcttgtgactatttttcattgaagcatgcgcttacctatgctgattcttactaaaagcataggctggggtatttattggcgaaaggaaatgtgtagtgtgggctggactgttggtggaggctggctttttagcccacttgctatacatgctgccaatggatttaagacttgaaatgttgaaagttgagtggaattatttccctcctaaaacatttatttacagtactcctctctacccctaaggttgggctctgcctcagaggagtgagttttttttttttttctataaagtttacattgtcttactatttattgagtgaatttctggtcattgcctatgcaaatataagaaatctggctttaaatattagtcagtttcatggctatgactagattgttttcttgtataactaaatacctgtataaaatgaactaatgttttctctcccctccctaccccttccttatgaacaatgctttaggtatattgaaatctttaagagcagtagagctgaagttagaactcattatgatccaccacgaaagcttatggccatgcagcggccaggtccttatgacagacctggggctggtagagggtataacagcattggcagaggagctggctttgagaggatgaggcgtggtgcttatggtggaggctatggaggctatgatgattacaatggctataatgatggctatggatttgggtcagatagatttggaagagacctcaattactgtttttcaggaatgtctgatcacagatacggggatggtggctctactttccagagcacaacaggacactgtgtacacatgcggggattaccttacagagctactgagaatgacatttataattttttttcaccgctcaaccctgtgagagtacacattgaaattggtcctgatggcagagtaactggtgaagcagatgtcgagttcgcaactcatgaagatgctgtggcagctatgtcaaaagacaaagcaaatatgcaacacagatatgtagaactcttcttgaattctacagcaggagcaagcggtggtgcttacgaacacagatatgtagaactcttcttgaattctacagcaggagcaagcggtggtgcttatggtagccaaatgatgggaggcatgggcttgtcaaaccagtccagctacgggggcccagccagccagcagctgagtgggggttacggaggcggctacggtggccagagcagcatgagtggatacgaccaagttttacaggaaaactccagtgattttcaatcaaacattgcataggtaaccaaggagcagtgaacagcagctactacagtagtggaagccgtgcatctatgggcgtgaacggaatgggagggttgtctagcatgtccagtatgagtggtggatggggaatgtaattgatcgatcctgatcactgactcttggtcaaccttttttttttttttttttttttctttaagaaaacttcagtttaacagtttctgcaatacaagcttgtgatttatgcttactctaagtggaaatcaggattgttatgaagacttaaggcccagtatttttgaatacaatactcatctaggatgtaacagtgaagctgagtaaactataactgttaaacttaagttccagcttttctcaagttagttataggatgtacttaagcagtaagcgtatttaggtaaaagcagttgaattatgttaaatgttgccctttgccacggtaaantggaccactgttttgggatgcatgttgaaagacatgcttttatttttttgtaaaacaatataggagctgtgtctactattaaaagtgaaacattttgggcatgtttgtttaaattcttagttttcattttaaataaaccctgttaagggcaacggtaaagttttaaagccttttnttnttnnttnttttaaagtttaaatggggggaaaaaaaatttt

SEQ ID NO: 582 - DNA, 82 bp, Homo sapiens
cagccgttaagccccgggacggcgaggcaggcgctcagagccccgcagcctggcccgtgaccccgcagagacgctgaggacc

SEQ ID NO: 583 - DNA, 3128 bp, Homo sapiens
tttggctttattcattttttgtgagagttgaccatcaggtatattggggaagggagagatggaggcaccttcatgagtgcctcccaagggcagtagcctctgcaacttgctgggggttcaggggaagcagggagttcatggggctcctccagcaaagatgagctccagggctgcttggatgtccccaccggtggcctgcagggcccgcaggctcagctcatcgtcctggatgcccatgtcacgtagctgctgcagctggggctgccactggctctgaaggctgggctgcccagaggcctgaagggcatgctgtagggcttggctgaagagatcattggtgatgggcgtccctgactggacaccagaggacattggtgaggtccctgaggaatgaccctgggtgccaggagtcggtgtgtgagagctgctctccggagtgctggccagggccaaggcggtggccagctcactctgggtgatgggccggggcccagcagctccactgtaccccagggaggctgggcgggagctgggagtactgctagagggtgtggacctggtgtttgggtgaaagtcatcctcatcatctgagagcccttcaaacaggaagccacctggcatatcccggtatgagctggagggcatgctccgggaagaggagtcagtcccaggcattggggcactgcctgctacggagtgcagaaccaggacaatggcattgacgagggctgggtgagcaggcaccaacgtatcaagcatattgggatcagcgaagacagagaagaggtccttgtcctggagaaccccaagagcaatagggtcactgctgaggcctggggtggccacaatgatctgatccagagactccttattgctgagcatcttaaagaccgcctccctgtaagaggagctgctgtgcagggcagtgtgcaacacccggaactctctcatggcagccactttgtccacaggttccggtttctgatcaggttcaggccaggactttcgcagaacatggacagtggacccaggttgaatgccatagaagtcaagtgtctggtcatcttttagcttccgaccacagtagatcagatcaatcagctcagggtctggaacagactcctggagtttgccagcaataagctgcttcagaaatgaaatactatagccccctagcgagtattctcccagttctgtctctggcaaccgaagaatagactttggagtaagtggctggtcagccagcttcaccgccaggtgccagtctgagagagacatcctctctctttcgcgctctctctttctccccgtcccgccgagaccgcgtccgccccgcgagcacagagcctcgcctttgccgatccgccgcccgtccacacccgccgccagctcaccatggatgatgatatcgccgcgctcgtcgtcgacaacggctccggcatgtgcaaggccggcttcgcgggcgacgatgccccccgggccgtcttcccctccatcgtggggcgccccaggcaccagggcgtgatggtgggcatgggtcagaaggattcctatgtgggcgacgaggcccagagcaagagaggcatcctcaccctgaagtaccccatcgagcacggcatcgtcaccaactgggacgacatggagaaaatctggcaccacaccttctacaatgagctgcgtgtggctcccgaggagcaccccgtgctgctgaccgaggcccccctgaaccccaaggccaaccgcgagaagatgacccagatcatgtttgagaccttcaacaccccagccatgtacgttgctatccaggctgtgctatccctgtacgcctctggccgtaccactggcatcgtgatggactccggtgacggggtcacccacactgtgcccatctacgaggggtatgccctcccccatgccatcctgcgtctggacctggctggccgggacctgactgactacctcatgaagatcctcaccgagcgcggctacagcttcaccaccacggccgagcgggaaatcgtgcgtgacattaaggagaagctgtgctacgtcgccctggacttcgagcaagagatggccacggctgcttccagctcctccctggagaagagctacgagctgcctgacggccaggtcatcaccattggcaatgagcggttccgctgccctgaggcactcttccagccttccttcctgggcatggagtcctgtggcatccacgaaactaccttcaactccatcatgaagtgtgacgtggacatccgcaaagacctgtacgccaacacagtgctgtctggcggcaccaccatgtaccctggcattgccgacaggatgcagaaggagatcactgccctggcacccagcacaatgaagatcaagatcattgctcctcctgagcgcaagtactccgtgtggatcggcggctccatcctggcctcgctgtccaccttccagcagatgtggatcagcaagcaggagtatgacgagtccggcccctccatcgtccaccgcaaatgcttctaggcggactatgacttagttgcgttacaccctttcttgacaaaacctaacttgcgcagaaaacaagatgagattggcatggctttatttgttttttttgttttgttttggttttccttttttttttggcttgactcaggatttaaaaactggaacggtgaaggtgacagcagtcggttggagcgagcatcccccaaagttcacaatgtggccgaggactttgattgcacattgttgtttttttaatagtcattccaaatatgagatgcattgttacaggaagtcccttgccatcctaaaagccaccccacttctctctaaggagaatggcccagtcctctcccaagtccacacaggggaggtgatagcattgctttcgtgtaaattatgtaatgcaaaatttttttaatcttcgccttaatacttttttattttgttttattttgaatgatgagccttcgtgcccccccttcccccttttttgtcccccaacttgagatgtatgaaggcttttggtctccctgggagtgggtggaggcagccagggcttacctgtacactgacttgagaccagttgaataaaagtgcacaccttaaaaatgaaaaaa

SEQ ID NO: 584 - DNA, 1283 bp, Homo sapiens
  modified_base (90): a, t, c, g, other or unknown
  modified_base (105): a, t, c, g, other or unknown
ggaacagccagcaggttttgctaagtcaactgtaatgcccttatccaatcagaattagggagggaaaatggctttgcagataaatatggnacactagccccacgntttctgagacattcctcaattgcttagacatattctgagcctacagcagaggaacctccagtctcagcaccatgaatcaaactgccattctgatttgctgccttatctttctgactctaagtggcattcaaggagtacctctctctagaactgtacgctgtacctgcatcagcattagtaatcaacctgttaatccaaggtctttagaaaaacttgaaattattcctgcaagccaattttgtccacgtgttgagatcattgctacaatgaaaaagaagggtgagaagagatgtctgaatccagaatcgaaggccatcaagaatttactgaaagcagttagcaaggaaaggtctaaaagatctccttaaaaccagaggggagcaaaatcgatgcagtgcttccaaggatggaccacacagaggctgcctctcccatcacttccctacatggagtatatgtcaagccataattgttcttagtttgcagttacactaaaaggtgaccaatgatggtcaccaaatcagctgctactactcctgtaggaaggttaatgttcatcatcctaagctattcagtaataactctaccctggcactataatgtaagctctactgaggtgctatgttcttagtggatgttctgaccctgcttcaaatatttccctcacctttcccatcttccaagggtactaaggaatctttctgctttggggtttatcagaattctcagaatctcaaataactaaaaggtatgcaatcaaatctgctttttaaagaatgctctttacttcatggacttccactgccatcctcccaaggggcccaaattctttcagtggctacctacatacaattccaaacacatacaggaaggtagaaatatctgaaaatgtatgtgtaagtattcttatttaatgaaagactgtacaaagtagaagtcttagatgtatatatttcctatattgttttcagtgtacatggaataacatgtaattaagtactatgtatcaatgagtaacaggaaaattttaaaaatacagatagatatatgctctgcatgttacataagataaatgtgctgaatggttttcaaaataaaaatgaggtactctcctggaaatattaagaaagactatctaaatgttgaaagaccaaaaggttaataaagtaattataact

SEQ ID NO: 585 - DNA, 864 bp, Homo sapiens
gcaggattgtgtcacagacacagagtaaacttttgctgggctccaagtgaccgcccatagtttattataaaggtgactgcaccctgcagccaccagcactgcctggctccacgtgcctcctggtctcagtatggcgctgtcctgggttcttacagtcctgagcctcctacctctggctggaagcccagatcccattgtgtgccaacctagtaccggtgcccatcaccaacgccaccctggaccggatcactggcaagtggttttatatcgcatcggcctttcgaaacgaggagtacaataagtcggttcaggagatccaagcaaccttcttttacttcacccccaacaagacagaggacacgatctttctcagagagtaccagacccgacaggaccagtgcatctataacaccacctacctgaatgtccagcgggaaaatgggaccatctccagatacgtgggaggccgagagcatttcgctcacttgctgatcctcagggacaccaagacctacatgcttgcttttgacgtgaacgatgagaagaactgggggctgtctgtctatgctgacaagccagagacgaccaaggagcaactgggagagttctacgaagctctcgactgcttgcgcattcccaagtcagatgtcgtgtacaccgattggaaaaaggataagtgtgagccactggagaagcagcacgagaaggagaggaaacaggaggagggggaatcctagcaggacacagccttggatcaggacagagacttgggggccatcctgcccctccaacccgacatgtgtacctcagctttttccctcacttgcatcaataaagcttctgtgtttggaacagctaaaaaaa

SEQ ID NO: 586 - DNA, 1782 bp, Homo sapiens
ctggcaggagcaggatggcggcggcggcggctgcaggcgaggcgcgccgggtgctggtgtacggcggcaggggcgctctgggttctcgatgcgtgcaggcttttcgggcccgcaactggtgggttgccagcgttgatgtggtggagaatgaagaggccagcgctagcatcattgttaaaatgacagactcgttcactgagcaggctgaccaggtgactgctgaggttggaaagctcttgggtgaagagaaggtggatgcaattctttgcgttgctggaggatgggccgggggcaatgccaaatccaagtctctctttaagaactgtgacctgatgtggaagcagagcatatggacatcgaccatctccagccatctggctaccaagcatctcaaggaaggaggcctcctaaccttggctggcgcaaaggctgccctggatgggactcctggtatgatcgggtacggcatggccaagggtgctgttcaccagctctgccagagcctggctgggaagaacagcggcatgccgcccggggcagccgccatcgctgtgctcccggttaccctggataccccgatgaacaggaaatcaatgcctgaggctgacttcagctcctggacacccttagaattcctagttgaaactttccatgactggatcacagggaaaaaccgaccgagctcaggaagcctaatccaggtggtaaccacagaaggaaggacggaactcaccccagcatatttttaggcctcatctcagtgcctatgaggggcctgccagaaaagtcactaacctgtctcagtgtggccttgtccagccttgtgttttctgtaacccctgtttgtggtacgagataatgagtcctatttttctctcacataatatgcatttgctctcctaggacagtgtaatacatttatgtgaagtaaagacatgcgagactggtggcctgcaaatagcatccgtcaatctgtgttaactgcatagggagggctctgcatagcacctgctatagcggtgtcatgttggatcgcttttgtgactgttcatctgtccttgacagtggctgtcatcttgactactttgttgatttgttggtattggggacattttaaaggctgagttatttttgaatgtcatgtttatgtcatagacgtagttttcgcatccttgaattaaactgccttaactccttttgtggtataagcaaaactacatggactctgtcctggtatccttttcctgtgtggttgccctgtgtcctctggcctagggttaagtgtgcaagataactactcgtgagtattcagaatgttgttcctaataaatgcacttgttgtctgtcttctttaatcaaatcacatcttatatacagcagtcagagatgagtatactagaatcatggattgctggaggtcttttaatctggtgttctcggaagggggtgcatttaaatcctgaaataaatatttcaacacaagaacacaggcctgattctgccttggacatgtccaaatctgggggtgatgggatggccctgtgcatttagaagcagctctccacatatggccaatgtaggctgtcctggtcgaaaactagtagtggtttaattcaaggatgcggaaaactacgtcttatgacataaacatgacattcaaaaataactcagcctttaactggcagagctaagcccagatctctagtcaccagactcttgctgtttttaaaggcctttaccacgtattttctttctttttttagtgaggtgaaattcacataa

SEQ ID NO: 587 - DNA, 4670 bp, Homo sapiens
  modified_base (1781)..(1894): a, t, c, g, other or unknown
  modified_base (2658)..(3015): a, t, c, g, other or unknown
tttccattttaatccagcatttaaaaagctatctagactaatgttaagtcccacaatagaggccccaagagtacagaaaacatgatcagactcgtacaactcaatgtttatttctgctattagggctttttccagcagtagttccccactgtttccaccatcgtggagacagaaatcgtcctaaaaaacacatgactagaacctggggtacagtggtgcaccaccattgctattatttgtttcttggttaagaatccagttcagcctttgttgaacccttttccctctaccccaatctagggtttgccttggtatcttgtcctcaaatttgtagctgacctaccacttctgcacctactctagcactcagctcccatctctgttgtaagaaggcaatcacagacatgacattgtgcacacaaccaggccaggtgaccttcactgaaacttgcttttaagccataacatacataattattactgaagtattacttatacaagggtttcattcatctatgaagatgttgcttttttttttgaattttgaaaaggaccaatctaaatttcctttatttaaatataaaattctataaaacaggtcactgaactaaaaaatcacattttttcatatgtcagttcatggccacacatagtacaagtcttacggtacatgtcatcttctaggttttcttctggtccatactcatgttgatgaacaatcgtctcccttttccacacgctgcttcttactgctcgccgcaattcttttacttttttatcaaatttcttctgtttcattttttctcggttttcctgtcggacttcctttgcttcttctaatgcttcttgactaccccaaacttcaagagacctcttcacaatctgtaactttaagtagagtttcatatcaccccattgtgaatgatgtggattcttcttcacaataaatttaagaggtggctctcttttttctaaatcacagtctttcagaagatattcttgttttgcctctgttttggttataagcttgtgtttatcatcagcatctctgcagttatcacaagttggcaaatcaaagtggttcataagataagaatccataaattctttcccacattcttcgcatattacataatcaaattccataacaggtcctggttgatgaacaacttttccaattttctgttcttcttcttcttcctcttctaaaatgaagcctcctcctgtgtcaattatctttggggctgcttttacattagccatgcctccagtagccgcagccgccgtcgccgagtagggccgggcagccagccgggcctggcgcagcatcagtgcccgctgccgcttccgctcgatactcgcccgcaccgaggcaggcagctccgcgggttgctctaaagccgccgcctccggcaaagccccgtcggccgccgccatctccggcccactccgaggacctagctcccagctccacgcacgcgcactgcacgccgaggcgagccagccgccctgcaccgcctctgcgctcccgcacccagcggcctttctgagtgagagcgcctgcgcagttaaggggctcggggtggcctgcccgggcgctgggcggagtctgggtatgcgcggacacggagtacccgcctaactacctgctctcttgtcatccgggagaagggtccgtgctgagatcatatctcacgacctggtcacctttaaaataggtctcgcttggtgattcagagtataggctttggagtcaggcctgggttaagtctgagctcttnnnnnnnnnnnnnnnnnnnnnnnnnnnnnnnnnnnnnnnnnnnnnnnnnnnnnnnnnnnnnnnnnnnnnnnnnnnnnnnnnnnnnnnnnnnnnnnnnnnnnnnnnnnnnnnnnntgccaggacaataacctggcacgtagaagacctcaaaaaatggtaacagtgagtagtagtagtgccagtcatagagcccaacagatgatagtcctgattttatgttggatacacggcctagagacacagccttagatttaaaatgagaagacctgggttgaaactcccagttaacttgctgtgtgacctcaggcaaatgcaggacttgctccaaggctgatatgcataaggttggctatctttcccatggaatattccttcagtgaggatgagctactgccaggtagacagtgggtttggatctgggccaaatatcctgacttcccaaaagtgtggctagtgtaacaaaagaaacatagcaggctttcccaaaaatgtatgctttccctttgttacaaataatgcttaattgaaaccagaaaacattaacttctaattactacatgtaccatttaggactggcttttagaaagacaacctcacacactgatgtttcccactaatgttcaatggttaacctttcagaaacacaattcagtgttctaatttatcggtcatatatacataaagctgcaaaacctcgtataaagcagttacctgctgaaatcttaggttgaattggagatagaatctcaagccatccccatctcccttcccctcagatccttctttctccctacccatcaatcttgcccaggtgaaactatttcaaattccataacatcaaaagcacaagcaacaaaagaaaaaaagctggacttcannnnnnnnnnnnnnnnnnnnnnnnnnnnnnnnnnnnnnnnnnnnnnnnnnnnnnnnnnnnnnnnnnnnnnnnnnnnnnnnnnnnnnnnnnnnnnnnnnnnnnnnnnnnnnnnnnnnnnnnnnnnnnnnnnnnnnnnnnnnnnnnnnnnnnnnnnnnnnnnnnnnnnnnnnnnnnnnnnnnnnnnnnnnnnnnnnnnnnnnnnnnnnnnnnnnnnnnnnnnnnnnnnnnnnnnnnnnnnnnnnnnnnnnnnnnnnnnnnnnnnnnnnnnnnnnnnnnnnnnnnnnnnnnnnnnnnnnnnnnnnnnnnnnnnnnnnnnnnnnnnnnnnnnnnnnnnnnnnnnnnnnnnnnnnnnnnnnnngtcgtccgcaaagcctgagtcctgtcctttctctctccccggacagcatgagcttcaccactcgctccaccttctccaccaactaccggtccctgggctctgtccaggcgcccagctacggcgcccggccggtcagcagcgcgggccagcgtctatgcaggcgctgggggctctggttcccggatctccgtgtcccgctccaccagcttcaggggcggcatggggtccgggggcctggccaccgggatagccgggggtctggcaggaatgggaggcatccagaacgagaaggagaccatgcaaagcctgaacgaccgcctggcctcttacctggacagagtgaggagcctggagaccgagaaccggaggctggagagcaaaatccgggagcacttggagaagaagggaccccaggtcagagactggagccattacttcaagatcatcgaggacctgagggctcagatcttcgcaaatactgtggacaatgcccgcatcgttctgcagattgacaatgcccgtcttgctgctgatgactttagagtcaagtatgagacagagctggccatgcgccagtctgtggagaacgacatccatgggctccgcaaggtcattgatgacaccaatatcacacgactgcagctggagacagagatcgaggctctcaaggaggagctgctcttcatgaagaagaaccacgaagaggaagtaaaaggcctacaagcccagattgccagctctgggttgaccgtggaggtagatgcccccaaatctcaggacctcgccaagatcatggcagacatccgggcccaatatgacgagctggctcggaagaaccgagaggagctagacaagtactggtctcagcagattgaggagagcaccacagtggtcaccacacagtctgctgaggttggagctgctgagacgacgctcacagagctgagacgtacagtccagtccttggagatcgacctggactccatgagaaatctgaaggccagcttggagaacagcctgagggaggtggaggcccgctacgccctacagatggagcagctcaacgggatcctgctgcaccttgagtcagagctggcacagacccgggcagagggacagcgccaggcccaggagtatgaggccctgctgaacatcaaggtcaagctggaggctgagatcgccacctaccgccgcctgctggaagatggcgaggactttaatcttggtgatgccttggacagcagcaactccatgcaaaccatccaaaagaccaccacccgccggatagtggatggcaaagtggtgtctgagaccaatgacaccaaagttctgaggcattaagccagcagaagcagggtaccatgatatttttgttttccttggactgaaacatagtctgggtcctcaacgttgccggtgatgatggttgaacatcatgttttttataaaccttaatttctcatttaataggaagaaaatctcaggagagccaaaagggaggacctgaaggtcagcatccaccaaatggagatggagaggatccgctacgtcctcagcagctacttgcggtgtcgcctcatgaaggtttgacgtggagatacctcaaagtctccgacctccggggagccgagagcgggacgtgggagccgggcttg

SEQ ID NO: 588 - DNA, 3803 bp, Homo sapiens
ccatggtaggagcgctcgcctcgctgcggtgcccgctgaggccatgccggggccccggcgccccgctggctcccgcctgcgcctgctcctgctcctgctgctgccgccgctgctgctgctgctccggggcagccacgcgggcaacctgacggtagccgtggtactgccgctggccaatacctcgtacccctggtcgtgggcgcgcgtgggacccgccgtggagctggccctggcccaggtgaaggcgcgccccgacttgctgccgggctggacggtccgcacggtgctgggcagcagcgaaaacgcgctgggcgtctgctccgacaccgcagcgcccctggccgcggtggacctcaagtgggagcacaaccccgctgtgttcctgggccccggctgcgtgtacgccgccgccccagtggggcgcttcaccgcgcactggcgggtcccgctgctgaccgccggcgccccggcgctgggcttcggtgtcaaggacgagtatgcgctgaccacccgcgcggggcccagctacgccaagctgggggacttcgtggcggcgctgcaccgacggctgggctgggagcgccaagcgctcatgctctacgcctaccggccgggtgacgaagagcactgcttcttcctcgtggaggggctgttcatgcgggtccgcgaccgcctcaatattacggtggaccacctggagttcgccgaggacgacctcagccactacaccaggctgctgcggaccatgccgcgcaaaggccgagttatctacatctgcagctcccctgatgccttcagaaccctcatgctcctggccctggaagctggcttgtgtggggaggactacgttttcttccacctggatatctttgggcaaagcctgcaaggtggacagggccctgctccccgcaggccctgggagagaggggatgggcaggatgtcagtgcccgccaggcctttcaggctgccaaaatcattacatataaagacccagataatcccgagtacttggaattcctgaagcagttaaaacacctggcctatgagcagttcaacttcaccatggaggatggcctggtgaacaccatcccagcatccttccacgacgggctcctgctctatatccaggcagtgacggagactctggcacatgggggaactgttactgatggggagaacatcactcagcggatgtggaaccgaagctttcaaggtgtgacaggatacctgaaaattgatagcagtggcgatcgggaaacagacttctccctctgggatatggatcccgagaatggtgccttcagggttgtactgaactacaatgggacttcccaagagctggtggctgtgtcggggcgcaaactgaactggcccctggggtaccctcctcctgacatccccaaatgtggctttgacaacgaagacccagcatgcaaccaagatcacctttccaccctggaggtgctggctttggtgggcagcctctccttgctcggcattctgattgtctccttcttcatatacaggaagatgcagctggagaaggaactggcctcggagctgtggcgggtgcgctgggaggacgttgagcccagtagccttgagaggcacctgcggagtgcaggcagccggctgaccctgagcgggagaggctccaattacggctccctgctaaccacagagggccagttccaagtctttgccaagacagcatattataagggcaacctcgtggctgtgaaacgtgtgaaccgtaaacgcattgagctgacacgaaaagtcctgtttgaactgaagcatatgcgggatgtgcagaatgaacacctgaccaggtttgtgggagcctgcaccgacccccccaatatctgcatcctcacagagtactgtccccgtgggagcctgcaggacattctggagaatgagagcatcaccctggactggatgttccggtactcactcaccaatgacatcgtcaagggcatgctgtttctacacaatggggctatctgttcccatgggaacctcaagtcatccaactgcgtggtagatgggcgctttgtgctcaagatcaccgactatgggctggagagcttcagggacctggacccagagcaaggacacaccgtttatgccaaaaagctgtggacggcccctgagctcctgcgaatggcttcaccccctgtgcggggctcccaggctggtgacgtatacagctttgggatcatccttcaggagattgccctgaggagtggggtcttccacgtggaaggtttggacctgagccccaaagagatcatcgagcgggtgactcggggtgagcagccccccttccggccctccctggccctgcagagtcacctggaggagttggggctgctcatgcagcggtgctgggctgaggacccacaggagaggccaccattccagcagatccgcctgacgttgcgcaaatttaacagggagaacagcagcaacatcctggacaacctgctgtcccgcatggagcagtacgcgaacaatctggaggaactggtggaggagcggacccaggcatacctggaggagaagcgcaaggctgaggccctgctctaccagatcctgcctcactcagtggctgagcagctgaagcgtggggagacggtgcaggccgaagcctttgacagtgttaccatctacttcagtgacattgtgggtttcacagcgctgtcggcggagagcacacccatgcaggtggtgaccctgctcaatgacctgtacacttgctttgatgctgtcatagacaactttgatgtgtacaaggtggagacaattggcgatgcctacatggtggtgtcagggctccctgtgcggaacgggcggctacacgcctgcgaggtagcccgcatggccctggcactgctggatgctgtgcgctccttccgaatccgccaccggccccaggagcagctgcgcttgcgcattggcatccacacaggacctgtgtgtgctggagtggtgggactgaagatgccccgttactgtctctttggggatacagtcaacacagcctcaagaatggagtctaatggggaagccctgaagatccacttgtcttctgagaccaaggctgtcctggaggagtttggtggtttcgagctggagcttcgaggggatgtagaaatgaagggcaaaggcaaggttcggacctactggctccttggggagagggggagtagcacccgaggctgacctgcctcctctcctatccctccacacctcccctaccctgtgccagaagcaacagaggtgccaggcctcagcctcacccacagcagccccatcgccaaaggatggaagtaatttgaatagctcaggtgtgctgaccccagtgaagacaccagataggacctctgagaggggactggcatggggggatctcagagcttacaggctgagccaagcccacggccatgcacagggacactcacacaggcacacgcacctgctctccacctggactcaggccgggctgggctgtggatccttgatcccctcccctccccatgctctcctccctcagccttgctaccctgtgacttactgggaggagagtcacctgaaggggaacatgaaaagagactaggtgaagagagggcaggggagcccacatctggggctggcccacaatacctgctcccccgaccccctccacccagcagtagacacagtgcacaggggagaagaggggtggcgcagaagggttgggggcctgtatgccttgcttctaccatgagcagagacaattaaaatctttattccagtg

SEQ ID NO: 589 - DNA, 2619 bp, Homo sapiens
gactcctaggggcttgcagacctagtgggagagaaagaacatcgcagcagccaggcagaaccaggacaggtgaggtgcaggctggctttcctctcgcagcgcggtgtggagtcctgtcctgcctcagggcttttcggagcctggatcctcaaggaacaagtagacctggccgcggggagtggggagggaaggggtgtctattgggcaacagggcggcaaagccctgaataaaggggcgcagggcaggcgcaagtgcagagccttcgtttgccaagtcgcctccagaccgcagacatgaaacttgtcttcctcgtcctgctgttcctcggggccctcggactgtgtctggctggccgtaggagaaggagtgttcagtggtgcgccgtatcccaacccgaggccacaaaatgcttccaatggcaaaggaatatgagaaaagtgcgtggccctcctgtcagctgcataaagagagactcccccatccagtgtatccaggccattgcggaaaacagggccgatgctgtgacccttgatggtggtttcatatacgaggcaggcctggccccctacaaactgcgacctgtagcggcggaagtctacgggaccgaaagacagccacgaactcactattatgccgtggctgtggtgaagaagggcggcagctttcagctgaacgaactgcaaggtctgaagtcctgccacacaggccttcgcaggaccgctggatggaatgtccctacagggacacttcgtccattcttgaattggacgggtccacctgagcccattgaggcagctgtggccaggttcttctcagccagctgtgttcccggtgcagataaaggacagttccccaacctgtgtcgcctgtgtgcggggacaggggaaaacaaatgtgccttctcctcccaggaaccgtacttcagctactctggtgccttcaagtgtctgagagacggggctggagacgtggcttttatcagagagagcacagtgtttgaggacctgtcagacgaggctgaaagggacgagtatgagttactctgcccagacaacactcggaagccagtggacaagttcaaagactgccatctggcccgggtcccttctcatgccgttgtggcacgaagtgtgaatggcaaggaggatgccatctggaatcttctccgccaggcacaggaaaagtttggaaaggacaagtcaccgaaattccagctctttggctcccctagtgggcagaaagatctgctgttcaaggactctgccattgggttttcgagggtgcccccgaggatagattctgggctgtaccttggctccggctacttcactgccatccagaacttgaggaaaagtgaggaggaagtggctgcccggcgtgcgcgggtcgtgtggtgtgcggtgggcgagcaggagctgcgcaagtgtaaccagtggagtggcttgagcgaaggcagcgtgacctgctcctcggcctccaccacagaggactgcatcgccctggtgctgaaaggagaagctgatgccatgagtttggatggaggatatgtgtacactgcatgcaaatgtggtttggtgcctgtcctggcagagaactacaaatcccaacaaagcagtgaccctgatcctaactgtgtggatagacctgtggaaggatatcttgctgtggcggtggttaggagatcagacactagccttacctggaactctgtgaaaggcaagaagtcctgccacaccgccgtggacaggactgcaggctggaatatccccatgggcctgctcttcaaccagacgggctcctgcaaatttgatgaatatttcagtcaaagctgtgcccctgggtctgacccgagatctaatctctgtgctctgtgtattggcgacgagcagggtgagaataagtgcgtgcccaacagcaacgagagatactacggctacactggggctttccggtgcctggctgagaatgctggagacgttgcatttgtgaaagatgtcactgtcttgcagaacactgatggaaataacaatgaggcatgggctaaggatttgaagctggcagactttgcgctgctgtgcctcgatggcaaacggaagcctgtgactgaggctagaagctgccatcttgccatggccccgaatcatgccgtggtgtctcggatggataaggtggaacgcctgaaacaggtgctgctccaccaacaggctaaatttgggagaaatggatctgactgcccggacaagttttgcttattccagtctgaaaccaaaaaccttctgttcaatgacaacactgagtgtctggccagactccatggcaaaacaacatatgaaaaatatttgggaccacagtatgtcgcaggcattactaatctgaaaaagtgctcaacctcccccctcctggaagcctgtgaattcctcaggaagtaaaaccgaagaagatggcccagctccccaagaaagcctcagccattcactgcccccagctcttctccccaggtgtgttggggccttggctcccctgctgaaggtggggattgcccatccatctgcttacaattccctgctgtcgtcttagcaagaagtaaaatgagaaattttgttgatattcaaaaaaaa

SEQ ID NO: 590 - DNA, 1645 bp, Homo sapiens
gggattcgggccgcccagctacgggaggacctggagtggcactgggcgcccgacggaccatccccgggacccgcctgcccctcggcgccccgccccgccgggccgctccccgtcgggttccccagccacagccttacctacgggctcctgactccgcaaggcttccagaagatgctcgaaccaccggccggggcctcggggcagcagtgagggaggcgtccagccccccactcagctcttctcctcctgtgccaggggctccccgggggatgagcatggtggttttccctcggagccccctggctcgggacgtctgagaagatgccggtcatgaggctgttcccttgcttcctgcagctcctggccgggctggcgctgcctgctgtgcccccccagcagtgggccttgtctgctgggaacggctcgtcagaggtggaagtggtacccttccaggaagtgtggggccgcagctactgccgggcgctggagaggctggtggacgtcgtgtccgagtaccccagcgaggtggagcacatgttcagcccatcctgtgtctccctgctgcgctgcaccggctgctgcggcgatgagaatctgcactgtgtgccggtggagacggccaatgtcaccatgcagctcctaaagatccgttctggggaccggccctcctacgtggagctgacgttctctcagcacgttcgctgcgaatgccggcctctgcgggagaagatgaagccggaaaggtgcggcgatgctgttccccggaggtaacccaccccttggaggagagagaccccgcacccggctcgtgtatttattaccgtcacactcttcagtgactcctgctggtacctgccctctatttattagccaactgtttccctgctgaatgcctcgctcccttcaagacgaggggcagggaaggacaggaccctcaggaattcagtgccttcaacaacgtgagagaaagagagaagccagccacagacccctgggagcttccgctttgaaagaagcaagacacgtggcctcgtgaggggcaagctaggccccagaggccctggaggtctccaggggcctgcagaaggaaagaagggggccctgctacctgttcttgggcctcaggctctgcacagacaagcagcccttgctttcggagctcctgtccaaagtagggatgcggattctgctggggccgccacggcctggtggtgggaaggccggcagcgggcggaggggattcagccacttccccctcttcttctgaagatcagaacattcagctctggagaacagtggttgcctgggggcttttgccactccttgtcccccgtgatctcccctcacactttgccatttgcttgtactgggacattgttctttccggccgaggtgccaccaccctgcccccactaagagacacatacagagtgggccccgggctggagaaagagctgcctggatgagaaacagctcagccagtggggatgaggtcaccaggggaggagcctgtgcgtcccagctgaaggcagtggcaggggagcaggttccccaagggccctggcacccccacaagctgtccctgcagggccatctgactgccaagccagattctcttgaataaagtattctagtgtggaaacgc

SEQ ID NO: 591 - DNA, 2215 bp, Homo sapiens
ccacgcccctttggcgtggtgccaccggacccctctggttcagtcccaggcggacccccccctcaccgcgcgaccccgcctttttcagcaccccagggtgagcccagctcagactatcatccggaaagcccccaaaagtcccagcccagcgctgaagtaacgggaccatgcccagtcccaggccccggagcaggaaggctcgagggcgcccccaccccacccgcccaccctccccgcttctcgctaggtccctattggctggcgcgctccgcggctgggatggcagtgggaggggaccctctttcctaacggggttataaaaacagcgccctcggcggggtccagtcctctgccactctcgctccgaggtccccgcgccagagacgcagccgcgctcccaccacccacacccaccgcgccctcgttcgcctcttctccgggagccagtccgcgccaccgccgccgcccaggccatcgccaccctccgcagccatgtccaccaggtccgtgtcctcgtcctcctaccgcaggatgttcggcggcccgggcaccgcgagccggccgagctccagccggagctacgtgactacgtccacccgcacctacagcctgggcagcgcgctgcgccccagcaccagccgcagcctctacgcctcgtccccgggcggcgtgtatgccacgcgctcctctgccgtgcgcctgcggagcagcgtgcccggggtgcggctcctgcaggactcggtggacttctcgctggccgacgccatcaacaccgagttcaagaacacccgcaccaacgagaaggtggagctgcaggagctgaatgaccgcttcgccaactacatcgacaaggtgcgcttcctggagcagcagaataagatcctgctggccgagctcgagcagctcaagggccaaggcaagtcgcgcctgggggacctctacgaggaggagatgcgggagctgcgccggcaggtggaccagctaaccaacgacaaagcccgcgtcgaggtggagcgcgacaacctggccgaggacatcatgcgcctccgggagaaattgcaggaggagatgcttcagagagaggaagccgaaaacaccctgcaatctttcagacaggatgttgacaatgcgtctctggcacgtcttgaccttgaacgcaaagtggaatctttgcaagaagagattgcctttttgaagaaactccacgaagaggaaatccaggagctgcaggctcagattcaggaacagcatgtccaaatcgatgtggatgtttccaagcctgacctcacggctgccctgcgtgacgtacgtcagcaatatgaaagtgtggctgccaagaacctgcaggaggcagaagaatggtacaaatccaagtttgctgacctctctgaggctgccaaccggaacaatgacgccctgcgccaggcaaagcaggagtccactgagtaccggagacaggtgcagtccctcacctgtgaagtggatgcccttaaaggaaccaatgagtccctggaacgccagatgcgtgaaatggaagagaactttgccgttgaagctgctaactaccaagacactattggccgcctgcaggatgagattcagaatatgaaggaggaaatggctcgtcaccttcgtgaataccaagacctgctcaatgttaagatggcccttgacattgagattgccacctacaggaagctgctggaaggcgaggagagcaggatttctctgcctcttccaaacttttcctccctgaacctgagggaaactaatctggattcactccctctggttgatacccactcaaaaaggacacttctgattaagacggttgaaactagagatggacaggttatcaacgaaacttctcagcatcacgatgaccttgaataaaaattgcacacactcagtgcagcaatatattaccagcaagaataaaaaagaaatccatatcttaaagaaacagctttcaagtgcctttctgcagtttttcaggagcgcaagatagatttggaataggaataagctctagttcttaacaaccgacactcctacaagatttagaaaaaagtttacaacataatctagtttacagaaaaatcttgtgctagaatactttttaaaaggtattttgaataccattaaaactgcttttttttttccagcaagtatccaaccaacttggttctgcttcaataaatctttggaaaaactc

SEQ ID NO: 592 - DNA, 682 bp, Mus musculus
agcgatttaaatgcttctttattcttacaaatactgtaaacatgaatataaaaagcatgcgcagtctcttcctcttatctacaaaagtctgtcggaaatgtcttttctacaaatgtaccttagctgcaatggtaataagacgtagaaaatgctaccattataaaaaataatttaaggggaaagattaatatagcttctctcgcagtccagtgcccaagctgcagcttcctgtcgctcgcaggtcccaaaggaacttgccgatccggccggcgtctgctccccgcctgtcggggtctgaggtataggtcgttcagagtctcaaaggcccacgccgcgcgttaccggcagtcggcgccggtggcgcggcaggaaaggcgggctgggcagttttttgaaaaaactgccggaggccagccaggtcccgggtgagctgctccacgcgctgatgcagcttctcgttctcgcccgacaactccaccagcttctgctgcatctcctggttgcggcgcttggccttgtcgcggctcttgcgcacagcgatgttgttgcgctcgcgccgctgccggtactccgggctgccgcggtccggacccctcttgcccgcgcccttttctcggactgtgccgggcgcgaggctcggccccgggctgcctcgaggaggctccggcgaagtgggtggagt

SEQ ID NO: 593 - DNA, 2854 bp, Homo sapiens
gtcaggactttacgacccgcgcctccagctgaggtttctagacgtgacccagggcagactggtagcaaagcccccacgcccagccaggagcaccgccgaggactccagcacaccgagggacatgctgggcctgcgccccccactgctcgccctggtggggctgctctccctcgggtgcgtcctctctcaggagtgcacgaagttcaaggtcagcagctgccgggaatgcatcgagtcggggcccggctgcacctggtgccagaagctgaacttcacagggccgggggatcctgactccattcgctgcgacacccggccacagctgctcatgaggggctgtgcggctgacgacatcatggaccccacaagcctcgctgaaacccaggaagaccacaatgggggccagaagcagctgtccccacaaaaagtgacgctttacctgcgaccaggccaggcagcagcgttcaacgtgaccttccggcgggccaagggctaccccatcgacctgtactatctgatggacctctcctactccatgcttgatgacctcaggaatgtcaagaagctaggtggcgacctgctccgggccctcaacgagatcaccgagtccggccgcattggcttcgggtccttcgtggacaagaccgtgctgccgttcgtgaacacgcaccctgataagctgcgaaacccatgccccaacaaggagaaagagtgccagcccccgtttgccttcaggcacgtgctgaagctgaccaacaactccaaccagtttcagaccgaggtcgggaagcagctgatttccggaaacctggatgcacccgagggtgggctggacgccatgatgcaggtcgccgcctgcccggaggaaatcggctggcgcaacgtcacgcggctgctggtgtttgccactgatgacggcttccatttcgcgggcgacgggaagctgggcgccatcctgacccccaacgacggccgctgtcacctggaggacaacttgtacaagaggagcaacgaattcgactacccatcggtgggccagctggcgcacaagctggctgaaaacaacatccagcccatcttcgcggtgaccagtaggatggtgaagacctacgagaaactcaccgagatcatccccaagtcagccgtgggggagctgtctgaggactccagcaatgtggtccatctcattaagaatgcttacaataaactctcctccagggtcttcctggatcacaacgccctccccgacaccctgaaagtcacctacgactccttctgcagcaatggagtgacgcacaggaaccagcccagaggtgactgtgatggcgtgcagatcaatgtcccgatcaccttccaggtgaaggtcacggccacagagtgcatccaggagcagtcgtttgtcatccgggcgctgggcttcacggacatagtgaccgtgcaggtccttccccagtgtgagtgccggtgccgggaccagagcagagaccgcagcctctgccatggcaagggcttcttggagtgcggcatctgcaggtgtgacactggctacattgggaaaaactgtgagtgccagacacagggccggagcagccaggagctggaaggaagctgccggaaggacaacaactccatcatctgctcagggctgggggactgtgtctgcgggcagtgcctgtgccacaccagcgacgtccccggcaagctgatatacgggcagtactgcgagtgtgacaccatcaactgtgagcgctacaacggccaggtctgcggcggcccggggagggggctctgcttctgcgggaagtgccgctgccacccgggctttgagggctcagcgtgccagtgcgagaggaccactgagggctgcctgaacccgcggcgtgttgagtgtagtggtcgtggccggtgccgctgcaacgtatgcgagtgccattcaggctaccagctgcctctgtgccaggagtgccccggctgcccctcaccctgtggcaagtacatctcctgcgccgagtgcctgaagttcgaaaagggcccctttgggaagaactgcagcgcggcgtgtccgggcctgcagctgtcgaacaaccccgtgaagggcaggacctgcaaggagagggactcagagggctgctgggtggcctacacgctggagcagcaggacgggatggaccgctacctcatctatgtggatgagagccgagagtgtgtggcaggccccaacatcgccgccatcgtcgggggcaccgtggcaggcatcgtgctgatcggcattctcctgctggtcatctggaaggctctgatccacctgagcgacctccgggagtacaggcgctttgagaaggagaagctcaagtcccagtggaacaatgataatccccttttcaagagcgccaccacgacggtcatgaaccccaagtttgctgagagttaggagcacttggtgaagacaaggccgtcaggacccaccatgtctgccccatcacgcggccgagacatggcttgccacagctcttgaggatgtcaccaattaaccagaaatccagttattttccgccctcaaaatgacagccatggccggccgggtgcttctgggggctcgtcggggggacagctccactctgactggcacagtctttgcatggagacttgaggagggagggcttgaggttggtgaggttaggtgcgtgtttcctgtgcaagtcaggacatcagtctgattaaaggtggtgccaatttatttacatttaaacttgtcagggtataaaatgacatcccattaattatattgttaatcaatcacgtgtatagaaaaaaaataaaacttcaatacaggctgtccatggaaaaaaaaggg

SEQ ID NO: 594 - DNA, 2972 bp, Homo sapiens; identical to SEQ ID NO: 378

SEQ ID NO: 595 - DNA, 385 bp, Homo sapiens; identical to SEQ ID NO: 472
  modified_base (319): a, t, c, g, other or unknown
  modified_base (355): a, t, c, g, other or unknown

SEQ ID NO: 596 - DNA, 4585 bp, Homo sapiens
ggcgccctctccccggtcttcccctctcttccccccgccctgccttcccttgcaccctccttcttccctccgcccgggagctctccctggtccccggcgccgcctccttccctcccggctccccgctccccgctcccgtggctgccgccgccccggggaagaagagacaggggtggggtttgggggaagcgagagaggaggggagagaccctggccaggctggagcctggattcgaggggaggagggacgggaggaggagaaaggtggaggagaagggaggggggagcggggaggagcggccgggcctggggccttgaggcccggggagagccggggagccgggcccgcgcgccgagatgttgctgctgctgttactggcgccactcttcctccgccccccgggcgcgggcggggcgcagacccccaacgccacctcagaaggttgccagatcatacacccgccctgggaagggggcatcaggtaccggggcctgactcgggaccaggtgaaggctatcaacttcctgccagtggactatgagattgagtatgtgtgccggggggagcgcgaggtggtggggcccaaggtccgcaagtgcctggccaacggctcctggacagatatggacacacccagccgctgtgtccgaatctgctccaagtcttatttgaccctggaaaatgggaaggttttcctgacgggtggggacctcccagctctggacggagcccgggtggatttccggtgtgaccccgacttccatctggtgggcagctcccggagcatctgtagtcagggccagtggagcacccccaagccccactgccaggtgaatcgaacgccacactcagaacggcgcgcagtgtacatcggggcactgtttcccatgagcgggggctggccagggggccaggcctgccagcccgcggtggagatggcgctggaggacgtgaatagccgcagggacatcctgccggactatgagctcaagctcatccaccacgacagcaagtgtgatccaggccaagccaccaagtacctatatgagctgctctacaacgaccctatcaagatcatccttatgcctggctgcagctctgtctccacgctggtggctgaggctgctaggatgtggaacctcattgtgctttcctatggctccagctcaccagccctgtcaaaccggcagcgtttccccactttcttccgaacgcacccatcagccacactccacaaccctacccgcgtgaaactctttgaaaagtggggctggaagaagattgctaccatccagcagaccactgaggtcttcacttcgactctggacgacctggaggaacgagtgaaggaggctggaattgagattactttccgccagagtttcttctcagatccagctgtgcccgtcaaaaacctgaagcgccaggatgcccgaatcatcgtgggacttttctatgagactgaagcccggaaagttttttgtgaggtgtacaaggagcgtctctttgggaagaagtacgtctggttcctcattgggtggtatgctgacaattggttcaagatctacgacccttctatcaactgcacagtggatgagatgactgaggcggtggagggccacatcacaactgagattgtcatgctgaatcctgccaatacccgcagcatttccaacatgacatcccaggaatttgtggagaaactaaccaagcgactgaaaagacaccctgaggagacaggaggcttccaggaggcaccgctggcctatgatgccatctgggccttggcactggccctgaacaagacatctggaggaggcggccgttctggtgtgcgcctggaggacttcaactacaacaaccagaccattaccgaccaaatctaccgggcaatgaactcttcgtcctttgagggtgtctctggccatgtggtgtttgatgccagcggctctcggatggcatggacgcttatcgagcagcttcagggtggcagctacaagaagattggctactatgacagcaccaaggatgatctttcctggtccaaaacagataaatggattggagggtcccccccagctgaccagaccctggtcatcaagacattccgcttcctgtcacagaaactctttatctccgtctcagttctctccagcctgggcattgtcctagctgttgtctgtctgtcctttaacatctacaactcacatgtccgttatatccagaactcacagcccaacctgaacaacctgactgctgtgggctgctcactggctttagctgctgtcttccccctggggctcgatggttaccacattgggaggaaccagtttcctttcgtctgccaggcccgcctctggctcctgggcctgggctttagtctgggctacggttccatgttcaccaagatttggtgggtccacacggtcttcacaaagaaggaagaaaagaaggagtggaggaagactctggaaccctggaagctgtatgccacagtgggcctgctggtgggcatggatgtcctcactctcgccatctggcagatcgtggaccctctgcaccggaccattgagacatttgccaaggaggaacctaaggaagatattgacgtctctattctgccccagctggagcattgcagctccaggaagatgaatacatggcttggcattttctatggttacaaggggctgctgctgctgctgggaatcttccttgcttatgagaccaagagtgtgtccactgagaagatcaatgatcaccgggctgtgggcatggctatctacaatgtggcagtcctgtgcctcatcactgctcctgtcaccatgattctgtccagccagcaggatgcagcctttgcctttgcctctcttgccatagttttctcctcctatatcactcttgttgtgctctttgtgcccaagatgcgcaggctgatcacccgaggggaatggcagtcggaggcgcaggacaccatgaagacagggtcatcgaccaacaacaacgaggaggagaagtcccggctgttggagaaggagaaccgtgaactggaaaagatcattgctgagaaagaggagcgtgtctctgaactgcgccatcaactccagtctcggcagcagctccgctcccggcgccacccaccgacacccccagaaccctctgggggcctgcccaggggaccccctgagccccccgaccggcttagctgtgatgggagtcgagtgcatttgctttataagtgagggtagggtgagggaggacaggccagtagggggagggaaagggagaggggaagggcaggggactcaggaagcagggggtccccatccccagctgggaagaacatgctatccaatctcatctcttgtaaatacatgtccccctgtgagttctgggctgatttgggtctctcatacctctgggaaacagacctttttctctcttactgcttcatgtaattttgtatcacctcttcacaatttagttcgtacctggcttgaagctgctcactgctcacacgctgcctcctcagcagcctcactgcatctttctcttcccatgcaacaccctcttctagttaccacggcaacccctgcagctcctctgcctttgtgctctgttcctgtccagcaggggtctcccaacaagtgctctttccacccccaaaggggcctctccttttctccactgtcataatctctttccatcttacttgcccttctatactttctcacatgtggctccccctgaattttgcttcctttgggagctcattcttttcgccaaggctcacatgctccttgcctctgctctgtgcactcacgctcagcacacatgcatcctcccctctcctgcgtgtgcccactgaacatgctcatgtgtacacacgcttttcccgtatgctttcttcatgttcagtcacatgtgctctcgggtgccctgcattcacagctacgtgtgcccctctcatggtcatgggtctgcccttgagcgtgtttgggtaggcatgtgcaatttgtctagcatgctgagtcatgtctttcctatttgcacacgtccatgtttatccatgtactttccctgtgtaccctccatgtaccttgtgtactttcttcccttaaatcatggtattcttctgacagagccatatgtaccctaccctgcacattgttatgcacttttccccaattcatgtttggtggggccatccacaccctctccttgtcacagaatctccatttctgctcagattccccccatctccattgcattcatgtactaccctcagtctacactcacaatcatcttctcccaagactgctcccttttgttttgtgtttttttgaggggaattaaggaaaaataagtgggggcaggtttggagagctgcttccagtggatagttgatgagaatcctgaccaaaggaaggcacccttgactgttgggatagacagatggacctatggggtgggaggtggtgtccctttcacactgtggtgtctcttggggaaggatctccccgaatctcaataaaccagtgaacagtgtgaaaaaacaaaacaaggggcggccgccgattattg

SEQ ID NO: 597 - DNA, 5451 bp, Homo sapiens
gtgtcccatagtgtttccaaacttggaaagggcgggggagggcgggaggatgcggagggcggaggtatgcagacaacgagtcagagtttccccttgaaagctcaaaagtgtccacgtcctcaaaaagaatggaaccaatttaagaagccagccccgtggccacgtcccttcccccattcgctccctcctctgcgcccccgcaggctcctcccagctgtggctgcccgggcccccagccccagccctcccattggtggaggcccttttggaggcaccctagggccagggaaacttttgccgtataaatagggcagatccgggctttattattttagcaccacggcagcaggaggtttcggctaagttggaggtactggccacgactgcatgcccgcgcccgccaggtgatacctccgccggtgacccagggggctctgcgacacaaggagtctgcatgtctaagtgctagacatgctcagctttgtggatacgcggactttgttgctgcttgcagtaaccttatgcctagcaacatgccaatctttacaagaggaaactgtaagaaagggcccagccggagatagaggaccacgtggagaaaggggtccaccaggccccccaggcagagatggtgaagatggtcccacaggccctcctggtccacctggtcctcctggcccccctggtctcggtgggaactttgctgctcagtatgatggaaaaggagttggacttggccctggaccaatgggcttaatgggacctagaggcccacctggtgcagctggagccccaggccctcaaggtttccaaggacctgctggtgagcctggtgaacctggtcaaactggtcctgcaggtgctcgtggtccagctggccctcctggcaaggctggtgaagatggtcaccctgggaaaacccggacgacctggtgagagaggagttgttggaccacagggtgctcgtggtttccctggaactcctggacttcctggcttcaaaggcattaggggacacaatggtctggatggattgaagggacagcccggtgctcctggtgtgaagggtgaacctggtgcccctggtgaaaatggaactccaggtcaaacaggagcccgtgggcttcctggtgagagaggacgtgttggtgcccctggcccagctggtgcccgtggcagtgatggaagtgtgggtcccgtgggtcctgctggtcccattgggtctgctggccctccaggcttcccaggtgcccctggccccaagggtgaaattggagctgttggtaacgctggtcctgctggtcccgccggtccccgtggtgaagtgggtcttccaggcctctccggccccgttggacctcctggtaatcctggagcaaacggccttactggtgccaagggtgctgctggccttcccggcgttgctggggctcccggcctccctggaccccgcggtattcctggccctgttggtgctgccggtgctactggtgccagaggacttgttggtgagcctggtccagctggctccaaaggagagagcggtaacaagggtgagcccggctctgcttgggccccaaggtcctcctggtcccagtggtgaagaaggaaagagaggccctaatggggaagctggatctgccggccctccaggacctcctgggctgagaggtagtcctggttctcgtggtcttcctggagctgatggcagagctggcgtcatgggccctcctggtagtcgtggtgcaagtggccctgctggagtccgaggacctaatggagatgctggtcgccctggggagcctggtctcatgggacccagaggtcttcctggttcccctggaaatatcggccccgctggaaaagaaggtcctgtcggcctccctggcatcgacggcaggcctggcccaattggcccagctggagcaagaggagagcctggcaacattggattccctggacccaaaggccccactggtgatcctggcaaaaacggtgataaaggtcatgctggtcttgctggtgctcggggtgctccaggtcctgatggaaacaatggtgctcagggacctcctggaccacagggtgttcaaggtggaaaaggtgaacagggtcccgctggtcctccaggcttccagggtctgcctggcccctcaggtcccgctggtgaagttggcaaaccaggagaaaggggtctccatggtgagtttggtctccctggtcctgctggtccaagaggggaacgcggtcccccaggtgagagtggtgctgccggtcctactggtcctattggaagccgaggtccttctggacccccagggcctgatggaaacaagggtgaacctggtgtggttggtgctgtgggcactgctggtccatctggtcctagtggactcccaggagagaggggtgctgctggcatacctggaggcaagggagaaaagggtgaacctggtctcagaggtgaaattggtaaccctggcagagatggtgctcgtggtgctcctggtgctgtaggtgcccctggtcctgctggagccacaggtgaccggggcgaagctggggctgctggtcctgctggtcctgctggtcctcggggaagccctggtgaacgtggtgaggtcggtcctgctggccccaatggatttgctggtcctgctggtgctgctggtcaacctggtgctaaaggagaaagaggagccaaagggcctaagggtgaaaacggtgttgttggtcccacaggccccgttggagctgctggcccagctggtccaaatggtccccccggtcctgctggaagtcgtggtgatggaggcccccctggtatgactggtttccctggtgctgctggacggactggtcccccaggaccctctggtatttctggccctcctggtccccctggtcctgctgggaaagaagggcttcgtggtcctcgtggtgaccaaggtccagttggccgaactggagaagtaggtgcagttggtccccctggcttcgctggtgagaagggtccctctggagaggctggtactgctggacctcctggcactccaggtcctcagggtcttcttggtgctcctggtattctgggtctccctggctcgagaggtgaacgtggtctaccaggtgttgctggtgctgtgggtgaacctggtcctcttggcattgccggccctcctggggcccgtggtcctcctggtgctgtgggtagtcctggagtcaacggtgctcctggtgaagctggtcgtgatggcaaccctgggaacgatggtcccccaggtcgcgatggtcaacccggacacaagggagagcgcggttaccctggcaatattggtcccgttggtgctgcaggtgcacctggtcctcatggccccgtgggtcctgctggcaaacatggaaaccgtggtgaaactggtccttctggtcctgttggtcctgctggtgctgttggcccaagaggtcctagtggcccacaaggcattcgtggcgataagggagagcccggtgaaaaggggcccagaggtcttcctggcttaaagggacacaatggattgcaaggtctgcctggtatcgctggtcaccatggtgatcaaggtgctcctggctccgtgggtcctgctggtcctaggggccctgctggtccttctggccctgctggaaaagatggtcgcactggacatcctggtacagttggacctgctggcattcgaggccctcagggtcaccaaggccctgctggcccccctggtccccctggccctcctggacctccaggtgtaagcggtggtggttatgactttggttacgatggagacttctacagggctgaccagcctcgctcagcaccttctctcagacccaaggactatgaagttgatgctactctgaagtctctcaacaaccagattgagacccttcttactcctgaaggctctagaaagaacccagctcgcacatgccgtgacttgagactcagccacccagagtggagcagtggttactactggattgaccctaaccaagggatgcactatggatgctatcaaagtatactgtgatttctctactggcgaaacctgtatccgggcccaacctgaaaacatcccagccaagaactggtataggagctccaaggacaagaaacacgtctggctaggagaaactatcaatgctggcagccagtttgaatataatgtagaaggagtgacttccaaggaaatggctacccaacttgccttcatgcgcctgctggccaactatgcctctcagaacatcacctaccactgcaagaacagcattgcatacatggatgaggagactggcaacctgaaaaaggctgtcattctacagggctctaatgatgttgaacttgttgctgagggcaacagcaggttcacttacactgttcttgtagatggctgctctaaaaagacaaatgaatggggaaagacaatcattgaatacaaaacaaataagccatcacgcctgcccttccttgatattgcacctttggacatcggtggtgctgaccaggaattctttgtggacattggcccagtctgtttcaaataaatgaactcaatctaaattaaaaaagaaagaaatttgaaaaaactttctctttgccatttcttcttcttcttttttaactgaaagctgaatccttccatttcttctgcacatctacttgcttaaattgtgggcaaaagagaaaaagaaggattgatcagagcattgtgcaatacagtttcattaactccttcccccgctcccccaaaaatttgaatttttttttcaacactcttacacctgttatggaaaatgtcaacctttgtaagaaaaccaaaataaaaattgaaaaataaaaaccataaacatttgcaccacttgtggcttttgaatatcttccacagagggaagtttaaaacccaaacttccaaaggtttaaactacctcaaaacactttcccatgagtgtgatccacattgttaggtgctgacctagacagagatgaactgaggtccttgttttgttttgttcataatacaaaggtgctaattaatagtatttcagatacttgaagaatgttgatggtgctagaagaatttgagaagaaatactcctgtattgagttgtatcgtgtggtgtattttttaaaaaatttgatttagcattcatattttccatcttattcccaattaaaagtatgcagattatttgcccaaagttgtcctcttcttcagattcagcatttgttctttgccagtctcattttcatcttcttccatggttccacagaagctttgtttcttgggcaagcagaaaaattaaattgtacctatttaaacatctcacatatacaaaataggtacaatgtttaaataaattgtgaaaaaaatgaaataaagcatgtttggttttccaaaagaaaaaaaaaaaaaaagggcg

SEQ ID NO: 598 - DNA, 2585 bp, Homo sapiens
  modified_base (161): a, t, c, g, other or unknown
  modified_base (2407)..(2444): a, t, c, g, other or unknown
gaattccggctctcaaattttctatagaatcaagatagaacctttagatgtctcaccacgaaactagcaactggaatgaagatagaaacaagtggttataactcagacaaactaatttgtcgagggtttattggaacacctgccccaccggtttgcgacanaagtttctcctgtcgccttcgtcagacgtcagaatgattccttgcagagccgcgctgacctttgcccgatgtctgatccggagaaaaatcgtgaccctggacagtctagaagacaccaaattatgccgctgcttatccaccatggacctcattgccctgggcgttggaagcacccttggggccggggtttatgtcctcgctggggaggtggccaaggcagactcgggccccagcatcgtggtgtccttcctcattgctgccctggcttcagtgatggctggcctctgctatgccgaatttggggcccgtgttcccaagacggggtctgcatatttgtacacctacgtgactgtcggagagctgtgggccttcatcactggctggaatctcattttatcgtatgtgataggtacatcaagtgttgcaagagcctggagtggcacctttgatgaacttcttagcaaacagattggtcagtttttgaggacatacttcagaatgaattacactggtcttgcagaatatcccgatttttttgctgtgtgccttatattacttctagcaggtcttttgtcttttggagtaaaagagtctgcttgggtgaataaagtcttcacagctgttaatattctcgtccttctgtttgtgatggttgctgggtttgtgaaaggaaatgtggcaaactggaagattagtgaagagtttctcaaaaatatatcagcaagtgccagagagccaccttctgaaaacggaacaagtatctatggggctggtggctttatgccttatggctttacgggaacgttggctggtgctgcaacttgcttttatgcctttgtgggatttgactgcattgcaacaactggtgaagaagttcggaatccccagaaagctattcccattggaattgtgacgtctttgcttgtttgctttatggcctattttggggtctctgcagctttaacacttatgatgccgtactacctcctcgatgaaaaaagcccccttcctgtagcgtttgaatatgtgggatggggtcctgccaaatatgtcgtcgcagctggttctctctgcgccttgtcaacaagtcttcttggatccattttcccaatgcctcgtgtaatctatgctatggcggaggatgggttgcttttcaaatgtctagctcaaatcaattccaaaacgaagacaccaataattgctactttatcatcgggtgcagtggcagctttgatggcctttctgtttgacctgaaggcgcttgtggacatgatgtccattggcacactcatggcctactctctggtggcagcctgtgttctcatcctcaggtaccagcctggcttatcttacgaccagcccaaatgttctcctgagaaagatggtctgggatcgtctcccagggtaacctcgaagagtgagtcccaggtcaccatgctgcagagacagggcttcagcatgcggaccctcttctgcccctcccttctgccaacacagcagtcagcttctctcgtgagctttctggtaggattcctagctttcctcgtgttgggcctgagtgtcttgaccacttacggagttcatgccatcaccaggctggaggcctggagcctcgctctcctcgcgctgtttcttgttctcttcgttgccatcgttctcaccatctggaggcagccccagaatcagcaaaaagtagccttcatggttccattcttaccatttttgccagcgttcagcatcttggtgaacatttacttgatggtccagttaagtgcagacacttgggtcagattcagcatttggatggcaattggcttcctgatttacttttcttatggcattagacacagcctggagggtcatctgagagatgaaaacaatgaagaagatgcttatccagacaacgttcatgcagcagcagaagaaaaatctgccattcaagcaaatgaccatcacccaagaaatctcagttcacctttcatattccatgaaaagacaagtgaattctaacacttgcaggagcagagctggtcatcgtcttagcatacatatcctacactgagtaaaccgtaacgggatgtcatcagcatgctgggttgtcatgggtttgctgcatacatagttcaccctaatttatacttactcatctggacagcatctcctcagatggtgaattatgtgcacggggaaacctcctgagtggaagtttcattcatcagtgatgaatagcccccaaacagtgggannnnnnnnnnnnnnnnnnnnnnnnnnnnnnnnnnnnnngcttgggaacatgagtgttacaagttagctggtgttttactattattgtgttacatttttccagtgtcgtcattaatcggtggcatatactgcacatactgaaatagagcgaaatcactgaatgttaagaggttcatctat

SEQ ID NO: 599 - DNA, 3064 bp, Homo sapiens
  modified_base (2669): a, t, c, g, other or unknown
  modified_base (2978): a, t, c, g, other or unknown
  modified_base (2985): a, t, c, g, other or unknown
  modified_base (2998)..(2999): a, t, c, g, other or unknown
  modified_base (3025): a, t, c, g, other or unknown
  modified_base (3030): a, t, c, g, other or unknown
  modified_base (3033): a, t, c, g, other or unknown
  modified_base (3041): a, t, c, g, other or unknown
  modified_base (3049): a, t, c, g, other or unknown
  modified_base (3052): a, t, c, g, other or unknown
cttttgtttatgcaaatagttcattccctccaacattcctccgggaatggtcccccctccactccacagaaaaccctcccctccctgctgtgcatgacgcgggctccctctgcacacagtgcacgaagacgctgtcgggagagcccaggattcaacacgggccttgagaaatgtggctcttgtacctcctggtgccggccctgttctgcagggcaggaggctccattcccatccctcagaagttatttggggaggtgacttcccctctgttccccaagccttaccccaacaactttgaaacaaccactgtgatcacagtccccacgggatacagggtgaagctcgtcttccagcagtttgacctggagccttctgaaggctgcttctatgattatgtcaagatctctgctgataagaaaagcctggggaggttctgtgggcaactgggttctccactgggcaaccccccgggaaagaaggaatttatgtcccaagggaacaagatgctgctgaccttccacacagacttctccaacgaggagaatgggaccatcatgttctacaagggcttcctggcctactaccaagctgtggaccttgatgaatgtgcttcccggagcaaatcaggggaggaggatccccagccccagtgccagcacctgtgtcacaactacgttggaggctacttctgttcctgccgtccaggctatgagcttcagaaagacaggcattcctgccaggctgagtgcagcagcgagctgtacacggaggcatcaggctacatctccagcctggagtaccctcggtcctacccccctgacctgcgctgcaactacagcatccgggtggagcggggcctcaccctgcacctcaagttcctggagccttttgatattgatgaccaccagcaagtacactgcccctatgaccagctacagatctatgccaacgggaagaacattggcgagttctgtgggaagcaaaggccccccgacctcgacaccagcagcaatgctgtggatctgctgttcttcacagatgagtcgggggacagccggggctggaagctgcgctacaccaccgagatcatcaagtgcccccagcccaagaccctagacgagttcaccatcatccagaacctgcagcctcagtaccagttccgtgactacttcattgctacctgcaagcaaggctaccagctcatagaggggaaccaggtgctgcattccttcacagctgtctgccaggatgatggcacgtggcatcgtgccatgcccagatgcaagatcaaggactgtgggcagccccgaaacctgcctaatggtgacttccgttacaccaccacaatgggagtgaacacctacaaggcccgtatccagtactactgccatgagccatattacaagatgcagaccagagctggcagcagggagtctgagcaaggggtgtacacctgcacagcacagggcatttggaagaatgaacagaagggagagaagattcctcggtgcttgccagtgtgtgggaagcccgtgaaccccgtggaacagaggcagcgcatcatcggagggcaaaaagccaagatgggcaacttcccctggcaggtgttcaccaacatccacgggcacgggggcggggccctgctgggcgaccgctggatcctcacagctgcccacaccctgtatcccaaggaacacgaagcgcaaagcaacgcctctttggatgtgttcctgggccacacaaatgtggaagagctcatgaagctaggaaatcaccccatccgcagggtcagcgtccacccggactaccgtcaggatgagtcctacaattttgagggggacatcgccctgctggagctggaaaatagtgtcaccctgggtcccaacctcctccccatctgcctccctgacaacgataccttctacgacctgggcttgatgggctatgtcagtggcttcggggtcatggaggagaagattgctcatgacctcaggtttgtccgtctgcccgtagctaatccacaggcctgtgagaactggctccggggaaagaataggatggatgtgttctctcaaaacatgttctgtgctggacacccatctctaaagcaggacgcctgccagggggatagtgggggcgtttttgcagtaagggacccgaacactgatcgctgggtggccacgggcatcgtgtcctggggcatcgggtgcagcaggggctatggcttctacaccaaagtgctcaactacgtggactggatcaagaaagagatggaggaggaggactgagcccagaattcactaggttcgaatccagagagcagtgtggaaaaaaaaaacaaaaaacaactgaccagttgttgataaccactaagagtctctattaaaattactgatgcagaaagaccgtgtgtgaaattctctttcctgtagtcccattgatgtactttacctgaaacaacccaaagggcccctttctttcttctgaggattgcagaggatatagttatcaatctctagttgtcactttcctcttccactttgataccattgggtcattgaatataactttttccaaataaagttttatgagaaatgccttatattttgtatttcctgtttctattgcatgtaatagacaactttctccacatcaaacatcaccatgtntttttataaagtcacagaataaaatttcttgatattgatgaaattgttccttaagcaaggaataccaatttccgcaacgttggattcagtccccttatgtcttctaaaagctatagtttatacactattttcaagcttaaattgattctacaggtttaaagtgttggaaaaaatttgtctgaaacatttcataatttgtttccagcatgaggtatctaaaggatttagaccagaggtctagattaaataactctatttttaacattttaaaaccttttattattaagttctttacattaaaaccatttnctttgtntaacttcttcttnnccatcattgtttaacttgggattaanatttngtntttaggtngggaaaanatnaggggcttttgt

SEQ ID NO: 600 - DNA, 5163 bp, Homo sapiens
  modified_base (4653)..(4674): a, t, c, g, other or unknown
aaggcccttcggggccggccaccctttcactacttctcccccggactccttggtagtctgttagtgggagatccttgttgccgtcccttcgcctccttcaccgccgcagaccccttcaagttctagtcatgcgtgagtgcatctccatccacgttggccagggctggtgtccagattgggcaatgcctgctgggagctctactgcctggaacacggcatccagcccgatggccagatgccaagtgacaagaccattgggggaggagatgattccttcaacaccttcttcagtgaaacgggtgctggcaagcatgtgccccgggcagtgtttgtagacttggaacccacagtcattgatgaagttcgcactggcacttaccgccagctcttccaccctgagcaactcatcacaggcaaggaagatgctgccaataactatgcccgagggcactacaccattggcaaggagatcattgacctcgtgttggaccgaattcgcaagctggctgaccagtgcaccggtcttcagggcttcttggttttccacagctttggtgggggaactggttctgggttcacctcgctgctcatggaacgtctctcagttgattatggcaagaagtccaagctggagttctccatttacccggcgccccaggtttccacagctgtagttgagccctacaactccatcctcaccacccacaccaccctggagcactctgattgtgccttcatggtagacaatgaggccatctatgacatctgtcgtagaaacctcgatatcgagcgcccaacctacactaaccttaaccgccttattagccagattgtgtcctccatcactgcttccctgagatttgatggagccctgaatgttgacctgacagaattccagaccaacctggtgccctacccccgcatccacttccctctggccacatatgcccctgtcatctctgctgagaaagcctaccatgaacagctttctgtagcagagatcaccaatgcttgctttgagccagccaaccagatggtgaaatgtgaccctcgccatggtaaatacatggcttgctgcctgttgtaccgtggtgacgtggttcccaaagatgtcaatgctgccattgccaccatcaaaaccaagcgcagcatccagtttgtggattggtgccccactggcttcaaggttggcatcaactaccagcctcccactgtggtgcctggtggagacctggccaaggtacagagagctgtgtgcatgctgagcaacaccacagccattgctgaggcctgggctcgcctggaccacaagtttgacctgatgtatgccaagcgtgcctttgttcactggtacgtgggtgaggggatggaggaaggcgagttttcagaggcccgtgaagatatggctgcccttgagaaggattatgaggaggttggtgtggattctgttgaaggagagggtgaggaagaaggagaggaatactaattatccattccttttggccctgcagcatgtcatgctcccagaatttcagcttcagcttaactgacagacgttaaagctttctggttagattgttttcacttggtgatcatgtcttttccatgtgtacctgtaatatttttccatcatatctcaaagtaaactttgtcgttgtttaaaaataaatatgtactacggaatatctcgaaaaactgcactagagacaaagacgtgatgttaatatcttttccccacaattattacggataaacagtagcaccaataaataaatgataacaaatattaaaattaaaaaaggagagagatttagtatgtagaattctctattttttcttgttttgtttttacatataaaaaacagaatagcaatgtctattttatcagaatcacatatatacataaacatatgtatatatatatacacacaaatacaagttgccaaatatatatatagtatgtagatgtatattgaaaccttatttcaaaggaatgtgtgctggggagccaggggatcggggagggcagagctgagtgttagcaaaattaaatatctgttcaagataagctagtgactgtcaccgatcagggagagagagattggaaacatgaattttatatacaaaaaccggtacaaataagagagcaagagagagcaaaagatacatctcataaatagttgaaattaaatattaaccaagaatactgaaaaaaaaaccctactctttaattaaattaactgttttaatttctaattaaaaagggatattaaataagtaccgtatataaaacactttctcttttctctgcctccacaatgggcacgtggatcctgccctgtctctctggtccttcccttcccttcccgaggcacagagagacagggcaggatccacgtgcccattgtggagggaagggaaggaccaggggatggaggaaggtcaaccactcacacacacacaaccaggtctcctggggggacagaactagtggtttcaatggtgtgaggacataggtccttttaggctgcatcccaggaaggggagcaggaagaggatgagggcgagtcccaggaaggggagctgtcatgggctgcttcttccaacaatgtgtctcttctcttcgccgggacatctgccagtggtctcctgggcaactcagaagcaggtgagagtaagcgaaggccgcccaggctcctgaatcttccaggcagtgcccctgggggcgagatgcgcgtgcagcatgtggagggaatccccaaagcacagcaatgtcctgaagctccccaaactcctggtcagagccggtgtcctcatccctgtacctgtgatctgtctttctgtccgtctgacctggggtagagaggctcagcgccagggctgggtttgtcggtgttcccaaaactgggtcatatttgcccccatgccctggccttgcacattcctgggcaggggagaggaccctggccccaccaagtgggacaaaaaaaagatcatgccagagtctctcatctcctcctcttccctgtcaggatctgagtgggaacattcccctcccaactcaagtccacagcagtcaaatacatccagtgaagacaccaataacattagcactgttaatttaaaaaaagaatatatatattttatatatataaaatagagatatttatttttatatatatataatatatatatatataaatgtatgtatgtgggtgggtgtgtctacaggaatcccagaaataaaactctctaatcttccgggctcggtgatttagcagcaagaaaaataaaatggcgaatccaattccaagagggaccgtgctgggtcacccgcccgggaatgcttccgccggagtctcgccctccggacccaaagtgctctgcgcagagtctcctcttccttcatttcaggtttctggattaaggactgttctgtcgatggtgatggtgtggtggcggcagcgtggtttctgtatcgatcgttctgtatcagtctttcctggtgagagatctggttcccgaaaccctgagggaggctccttcctcctgcccggctcaccgcctcggcttgtcacatctgcaagtacgttcgtttaactcaagctgcctcgccttgcaacgcgagtctgtgtttttgcaggaacatttacacgtctgcggatcttgtacaaacaaatgctttctccgctctgagcaaggcccacagggattttcttgtcttgctctatctttctttggtctgcattcacatttgttgtgctgtaggaagctcatctctcctatgtgctggccttggtgaggtttgatccgcataatctgcatggtgatgttggactcctcagtgggcacacactccaggccctcgtcattgcagcagcccccgcatcgcatcaggggcacacaggatggcttgaagatgtactcgatctcatcagggtactcctggaagatgtccaccagggtctcgattggatggcagtagctgcgctgatagacatccatgaacttcaccacttcgtgatgattctgccctcctccttctgccatgggtgcagcctgggaccacttggcatggtggaggtagagcagcaaggcaaggctccaatgcacccaagacagcagaaagttcatggtttcggaggcccgaccggggccggcgcggctcgcgctccctctccggctcgggctgtggggcggcccgctctcctcggcgcctcggcgagctactcttcctccccggcccgaggcccgggccagggcctggggagcgcgcgcggctggagcactgtctgcgcacaccgccgcctcacccgtccatgagcccggcttccgagcgccgagtcgccactgcggccccctctcctcttccttctcttcttcctcctccccctcctccggctgcggctcctcccggcccgagctagcacttctcgcggctccgctcggctcggcttcccccgcgcggaccacggctcctccgaagcgagaacagcccagaagttggacgaaaagtttcagtgcgacgccgcgagccccgaccccctccaccccgcctccgggcgcgggctccggcccctgcccgcggctcgccgccgcgtccactgtccgccgccggccggggaggaggtggtagctggggctgggggcggnnnnnnnnnnnnnnnnnnnnnncgcgactggtcagctgcgggatcccaagggggagggctcacgccgcgctccggcggtcacccccaaaagcaggtcactcactttgcccctgtcgctttcgctgctcgcacgcccgcgcgctctctctgaccccgtctctctcttcctcgacttctctctggagctcttgctacctctttcctctttctgctggtttccaaaatccacagtgatttggggaagtagagcaatctccccaagccgtcggcccgattcaagtggggaatggcaagcaaaaataaattaaaacgagaaacaatacagttttaaaaaaaaatgtttaagaaaaaagaagagggataaaacccggatcaatgaatatcaaattccagcaccgagcgccctggccggtgagtccgctgaccggtccacctaaccgctgcgcctcccgacagagcgctggtgctagcccccagcgccacgacctccgagctacccggctgccccaag

SEQ ID NO: 601 - DNA, 434 bp, Homo sapiens
  modified_base (126): a, t, c, g, other or unknown
  modified_base (297): a, t, c, g, other or unknown
  modified_base (329): a, t, c, g, other or unknown
  modified_base (359): a, t, c, g, other or unknown
  modified_base (371): a, t, c, g, other or unknown
  modified_base (377): a, t, c, g, other or unknown
  modified_base (390): a, t, c, g, other or unknown
  modified_base (396): a, t, c, g, other or unknown
  modified_base (413): a, t, c, g, other or unknown
  modified_base (427): a, t, c, g, other or unknown
gcttttatacacaacgtttttgttaggcatcacagttttgcaacctctgctccaaagagaaacatagaatgagttttctttcttttttttttttttggagtcagagtctcgctctcttgtccaggntggagtgcaatagcgcgatctgggctcactgcaacctccgcctccctggttcaagcaattctcctgccttgcctcctgagtagctgggattacaggcgtgtgtcaccacgcttcggctaatttttgtatttttagtagaggcagggtttcaccatgtcaagctggttcttnggactccctgacgtcgtgatccacccgccttngccttcccaaagtactggggattacaggtntgacatcttttngcccgntccgtttttcttnaaagtngaggctttaaatttctngaactcttaggtgnatttcat

SEQ ID NO: 602 - DNA, 3061 bp, Homo sapiens
gaattccaggcgtcggtgctcagcggtgttggaacttcgttggcttgcttgcctgtgcgcgcgtgcgcggacatggcctcaaacggtagattatacccaacaagcaacccaaagctatggggcctaccccacccagcccgggcagggctattcccagcagagcagtcagccctacggacagcagagttacagtggttatagccagtccacggacacttcaggctatggccagagcagctattcttcttatggccagagccagaacacaggctatggaactcagtcaactccccagggatatggctcgactggcggctatggcagtagccagagctcccaatcgtcttacgggcagcagtcctcctatcctggctatggccagcagccagctcccagcagcacctcgggaagttacggtagcagttctcagagcagcagctatgggcagccccagagtgggagctacagccagcagcctagctatggtggacagcagcaaagctatggacagcagcaaagctataatccccctcagggctatggacagcagaaccagtacaacagcagcagtggtggtggaggtggaggtggaggtggaggtaactatggccaagatcaatcctccatgagtagtggtggtggcagtggtggcggttatggcaatcaagaccagagtggtggaggtggcagcggtggctatggacagcaggaccgtggaggccgcggcaggggtggcagtggtggcggcggggcggcggcggtggtggttacaaccgcagcagtggtggctatgaacccagaggtcgtggaggtggccgtggaggcagaggtggcatgggcggaagtgaccgtggtggcttcaataaatttggtgtgttcaagaaggaagtgtatcttcatacatcaccacacctgaaagcagatgtgcttttccagactgatccaactgcagagatggcagctgagtcattgcctttctccttcgggacactgtccagctgggagctggaagcctggtatgaggacctgcaagaggtcctgtcttcagatgaaaatgggggtacctatgtttcacctcctggaaatgaagaggaagaatcaaaaatcttcaccactcttgaccctgcttctctggcttggctgactgaggaggagccagaaccagcagaggtcacaagcacctcccagagccctcactctccagattccagtcagagctccctggctcaggaggaagaggaggaagaccaagggagaaccaggaaacggaaacagagtggtcattccccagcccgggctggaaagcagcgcatgaaggagaaagaacaggagaatgaaaggaaagtggcacagctagctgaagagaatgaacggctcaagcaggaaatcgagcgcctgaccagggaagtagaggcgactcgccgagctctgattgaccgaatggtgaatctgcaccaagcatgaacaattgggagcatcagtcccccacttgggccacactacccacctttcccagaagtggctactgactaccctctcactagtgccaatgatgtgaccctcaatcccacatacgcagggggaaggcttggagtagacaaaaggaaaggtctcagcttgtatatagagattgtacatttatttattactgtccctatctattaaagtgactttctatgagccaaggtcttttactttttcttcttgcctttaggggcttcagggggtttcccctcagctacagccaactgtttctttagatccaagagtttcgccacctccgcagcaacctcgttcttgtctgccttttgtgctttcagttctcggacaatgtttccctaagataaaggggggtggggaggtaacagtgaggcaagaaaaagatctatttaggattcagcttgtccagtctcccacagggcttaagcttcatacttgttttgtcacttcatccatcagcgcttgtatctgctgtggcttggctgttgtaacagtctctacaactgctggcttcggggacgttttgcctggagaacaacaaagttatcaccagcaaccataaatatcccctaacctccagttttatacagcatctcagagggaaagtggttacctttaagtcgaaggtctcttctagttaagacaggaaagaaaaactgtaagtgaggaagcggcagggccaaaagatggaaagagtgatgggtgaggactacttagggaaattagggaagtgatgctgtggctgttgtggagcgagggcacagcctttagctttctcacctggccccctccaaagcgctgccttaaactttcaatctggtcattttccaatttttggaacaagggactgacctgtaaaaaaagagttccagaatcatctactgattggatacagactctaccatagactatacagatgacctctccaaccccaatctctgatgtgttttagaaagaacgagcttaacactgagctaatatctgctgattttaggaaattagctgtagctttccctgtgaaaccccaaataatttgtagggtcaaagattctttaagctctctaaggatgctaggctgatccagaagtttagcaatgtacttactttttcattttgtgtcaaagaggaaatggctttcctgtattttccctgcccactatctgctagcattatggagactaggtgatcacagtgtttcttcaaatatctgtttaccagttagttttgtgtgccaggttctggtttctggcatgaagaacaatgaagatgtacagataattccggacttgtgaacgactaccaaggactttatatcagaaacttaggagtcccatgaccaaagtaacactggagagatgttaggtcttctctcacccactccaaaagctgcatggcaagagtatcaattttaagagaggctggctcttccacctactgtgccaatctggtgtcctgctggtaaggtacacaggaagtttgtcagcaggatactgcaggctggaggtgggagctgcagctgggcctggattgtggcactaaccgtgggcatgtaaggctgaag

SEQ ID NO: 603 - DNA, 2086 bp, Homo sapiens
  modified_base (1695)..(1787): a, t, c, g, other or unknown
aagtgcaggaagcgcttggggactgcccagccctcagctgtgttattattcggtgataggtatttgctaattacttccaaaagcctcccatctgtcatcccacccagactgcgcgcttctaattcctcctaccccacatgctgtgcccaatgaaaagtatggtcagcgagcgaaggtttgcaaggagacagacgagggcgaaattaagccaggcggcttccctttaaatcctcgcaaagcagaagggcccctcactctggcagcaggccttggccaaggggcctttagccctgacgacccggggaagagtctcccaaagcagaacgcccggtccggcgcccagaccaaacgcgggggaaccggaagggcgaggcctccaccttgccgggattgctgtccttgccattggactatggctccgattcgactctcagaccaagagcatcttcgagcaagaaactaataataataattccagcttctacacaggagtctatattctgatcggagccggcgccctcatgatgctggtgggcttcctgggctgctgcggggctgtgcaggagtcccagtgcatgctgggactgttcttcggcttcctcttggtgatattcgccattgaaatagctgcggccatctggggatattcccacaaggatgaggtgattaaggaagccaggagttttacaaggacacctacaacaagctgaaaaccaaggatgagccccagcgggaaacgctgaaagccatccactatgcgttgaactgctgtggtttggctgggggcgtggaacagtttatctcagacatctgccccaagaaggacgtactcgaaaccttcaccgtgaaggtaaactcagaccaggatcctggtgtccctgcccccattgctctggacaaaccctgcaagcatgaaagtgacagcagccaagtgctgcttcagcaagacccgttctgcctgtgaaagggccccagggcacccatctctttctctcccactttgggccctctgtttactcaagggcaataaaacaaaggccggaccaggggaatgacaagtgttctggcaccgcccactgctgccagcccggaagctctcaagggcaggcgtgcttctgagtcttggactcccactctgactttgtcagtggctcctgtctgtaagccagagttaatgtccaactccagaatagtaaaaggtgaccttacaaccatgtcagaaatagacccccaagcagggctgtccctcctccttccctgacgtcctgcccagattttagggatccactagcatagccatccctttgttcgccttttcatccaccagccagaacttctcttatccccgaacactcctgtccccagcccaccctctgcccaccagttctcccgggtgagacgggggccatgggagggaggaggtgccctgggaggaaggattgtgtgtgacccaggtcttggtttgtctccccaagtcctgtcctgatgccatcaaagaggtcttcgacaataaattccacatcatcggcgcagtgggcatcggcattgccgtggtcatgatatttggcatgatcttcagtatgatcttgtgctgtgctatccgcaggaaccgcgagatggtctagagtcagcttactttcctggtcagggatgtaagctgactctagaccaggaaagtttacccatgaagattgnnnnnnnnnnnnnnnnnnnnnnnnnnnnnnnnnnnnnnnnnnnnnnnnnnnnnnnnnnnnnnnnnnnnnnnnnnnnnnnnnnnnnnnnnnnnnaaagctgaagttactttatgtttgtcttttaatgcttcattcaatattgacatttgtagttgagcggggggtttggtttgctttggtttatattttttcagttgtttgtttttgcttgttatattaagcagaaatcctgcaatgaaaggtactatatttgctagactctagacaagatattgtacataaaagaatttttttgtctttaaatagatacaaatgtctatcaactttaatcaagttgtaacttatattgaagacaatttgatacataataaaaaattatgacaatgtcctgg

SEQ ID NO: 604 - DNA, 2635 bp, Homo sapiens
ggcagagcgggctgagtcacaggcacaggtgaggaatcaactcaaactcctctctctgggaaaacgcggtgcttgctcctcccggagtggccttggcagggtgttggagccctcggtctgccccgtccggtctctggggccaaggctgggtttccctcatgtatggcaagagctctactcgtgcggtgcttcttctccttggcatacagctcacagctctttggcctatagcagctgtggaaatttatacctcccgggtgctggaggctgttaatgggacagatgctcggttaaaatgcactttctccagctttgcccctgtgggtgatgctctaacagtgacctggaattttcgtcctctagacgggggacctgagcagtttgtattctactaccacatagatcccttccaacccatgagtgggcggtttaaggaccgggtgtcttgggatgggaatcctgagcggtacgatgcctccatccttctctggaaactgcagttcgacgacaatgggacatacacctgccaggtgaagaacccacctgatgttgatggggtgataggggagatccggctcagcgtcgtgcacactgtacgcttctctgagatccacttcctggctctggccattggctctgcctgtgcactgatgatcataatagtaattgtagtggtcctcttccagcattaccggaaaaagcgatgggccgaaagagctcataaagtggtggagataaaatcaaaagaagaggaaaggctcaaccaagagaaaaaggtctctgtttatttagaagacacagactaacaattttagatggaagctgagatgatttccaagaacaagaaccctagtatttcttgaagttaatggaaacttttctttggcttttccagttgtgacccgttttccaaccagttctgcagcatattagattctagacaagcaacacccctctggagccagcacagtgctcctccatatcaccagtcatacacagcctcattattaaggtcttatttaatttcagagtgtaaattttttcaagtgctcattaggttttataaacaagaagctacatttttgcccttaagatactacttacagtgttatgacttgtatacacatatattggtatcaaaagggataaaagccaatttgtctgttacatttcctttcacgtatttcttttagcagcacttctgctactaaagttaatgtgtttactctctttccttcccacattctcaattaaaaggtgagctaagcctcctcggtgtttctgattaacagtaaatcctaaattcaaactgttaaatgacatttttatttttatgtctctccttaactatgagacacatcttgttttactgaatttctttcaatattccaggtgatagatttttgttgttttgttaattaatccaagatttacaatagcacaacgctaaatcacacagtaactacaaaaggttacatagatatgaaaagattggcagaggccattgcaggatgaatcacttgtcacttttcttctgtgctgggaaaaataatcaacaatgtgggtctttcatgagcagtgacggatagtttagcttactatgtttcccccccaattcaatgatctataacaacagagcaaagtctatgctcatttgcagactggaatcattaagtaatttaataaaaagattgtgaaacagcatattacaagtttgaaaattcagggctggtgaaaaaaaatcaactctaaatgatgataattttgtacagttttatataaaactctgagaactagaagaaattattaactttttttcttttttaattctaattcacttgtttattttgggggaggaagactttggtatggagcaaagaaataccaaaactactttaaatggaataaaaccaactttattctttttttcccccatactggtagataaagcaaactttataagtgggctattgaaagaaaagttacaagcttaagatacagaagcatttgttcaaaggatagaaagcatctaaaagtttaggctcaagatcaatctttacagattgatattttcagtttttaatcgactggactgcagatgttttttcttttaacaaactggaattttcaaacagattatctgtatttaaatgtatagaccttgatatttttccaatactattttttaaaaaattgtatgatttacatatgaacctcagttctgaaattcattacatatctgtctcattctgccttttatactgtctaaaaaagcaaagttttaaagtgcaattttaaaactgtaaattacatctgaaggctatatatcctttaatcacattttatattttttcttcacaattctaacctttgaaaatattataactggatatttcttcaaacagatgtcctggatgatggtccataagaataatgaagaagtagttaaaaatgtatggacagtttttccggcaaaatttgtagcttatgtcttggctaaatagtcaaggggtaatatgggcctgttgtttagtgtctccttcctaaagagcacttttgtattgtaatttattttttattatgctttaaacactatgtaaataaacctttagtaataaagaattatcagttatat

SEQ ID NO: 605 - DNA, 392 bp, Homo sapiens
  modified_base (323): a, t, c, g, other or unknown
  modified_base (364)..(366): a, t, c, g, other or unknown
  modified_base (373): a, t, c, g, other or unknown
  modified_base (388)..(389): a, t, c, g, other or unknown
ttatactctgattgctcacttacagtataaaatattcaccccgctaaataaataagacgacattattgcaaacggcacttaaaccccccctgagagataagacctcccttagctcaggcagggggtgctcctgagtttctgtgtgagattccccaagcacagatatactctgggggctgagatggacaaaggcttgggaaaccgcactttgtgcttctggtcctgcagtagctccaaacagggttgtggagctggtggggaaagttgggggtaggggaaagttgggggtaggggaaattttgggcagtgccttcatcagcccngtcctagagagagtagaggggaatggaagtggggggaaccnnnctggggncaagagaagaggggnngtt

SEQ ID NO: 606 - DNA, 2038 bp, Homo sapiens
atcaggtgggcaggtcccttgcacaagtaaatctggacagctcctcccctcacttcctctcttctcctgtttctcaacatcctggcttagtattgtgtgcaaaatcagagaggggtgcaagatcctgatttttcaggagttcaagcgacaatggcagcccaatacggcagtatgagcttcaaccccagcacaccaggggccagttatgggcctggaaggcaagagcccagaaattcccaattgagaattgtgttagtgggtaaaaccggagcaggaaaaagtgcaacaggaaacagcatccttggccggaaagtgtttcattctggcactgcagcaaaatccattaccaagaagtgtgagaaacgcagcagctcatggaaggaaacagaacttgtcgtagttgacacaccaggcattttcgacacagaggtgcccaatgctgaaacgtccaaggagattattcgctgcattcttctgacctccccagggcctcatgctctgcttctggtggttccactgggccgttacactgaggaagagcacaaagccacagagaagatcctgaaaatgtttggagagagggctagaagtttcatgattctcatattcacccggaaagatgacttaggtgacaccaatttgcatgactacttaagggaagctccagaagacattcaagacttgatggacattttcggtgaccgctactgtgcgttaaacaacaaggcaacaggcgctgagcaggaggcccagagggcacagttgctgggcctgatccagcgcgtggtgagggagaacaaggaaggctgctacactaataggatgtaccaaagggcggaggaggagatccagaagcaaacacaagcaatgcaagaactccacagagtggagctggagagagagaaagcgcggataagagaggagtatgaagagaaaatcagaaagctggaagataaagtggagcaggaaaagagaaagaagcaaatggagaagaaactagcagaacaggaggctcactatgctgtaaggcagcaaagggcaagaacggaagtggagagtaaggatgggatacttgaattaatcatgacagcgttacagattgcttcctttattttgttacgtctgttcgcggaagattaaacttaatgaaaatctgtttgtattttctgcatattctctggcaaccttgccccatacttacttatttagcatagtcgagtgctctagtttctgtctctcaggcactcgtaactaaggaccaccattggccattggtagatgtttgattgacttaacaagagagggacaaattttcaatttgtgaaactccaaagcagaaagtattggtgcttgctaccttgtgaattcttccttagacatgcagagaaaatgtatgcaagagaccaaaaagatggctccaagctatgtcatgttacctgtaataaaatcttttcttctagattctttctatgttggcagataatctccccttgtagcttccactcacttattcttgcattcagagtcacaatgatcatcttacccatgtggtttttgagaaagaaagatcaattctttgtttgcagtaggtaatcttagagatggagatgattgtagaattattcctagatgagtgtcaatttatttaattccattgtcatataaggagtcaaattgtttcttatcatttgttcattgaagaacagagacctgtctggaaaatcgatctctacaaattcaattaaataatgatccccaaatgctgaaaaagtgaaatacagcaattcaacagataatagagcaatgtttagtatattcagctgtatctgtagaaactctttgacgaacctcaatttaaccaatttgatgaatacccagttctcttcttttctagagaaagatagttgcaacctcacctccctcactcaacactttgaatacttattgtttggcaggtcatccacacacttctgcccccactgcattgaattttttgcttatgttgtttataataaaacttttcaattatctcataaaa

SEQ ID NO: 607 - DNA, 388 bp, Homo sapiens
  modified_base (68)..(170): a, t, c, g, other or unknown
gcatttccctgaaacctgggctcttgaagacgcatcactggagcagatggataatggagactggggcnnnnnnnnnnnnnnnnnnnnnnnnnnnnnnnnnnnnnnnnnnnnnnnnnnnnnnnnnnnnnnnnnnnnnnnnnnnnnnnnnnnnnnnnnnnnnnnnnnnnnnnctgacccagtcacattaaatgtaggtggacacttgtatacaacgtctctcaccacattgacgcgttacccggattccatgcttggagctatgtttgggggggacttccccacagctcgagaccctcaaggcaattactttattgatcgagatggacctcttttccgatatgtcctcaacttcttaagaacttcagaattgaccttaccgttggatttt

SEQ ID NO: 608 - DNA, 322 bp, Unknown Organism
  Description of Unknown Organism: BAB25870.1 putative
  modified_base (218): a, t, c, g, other or unknown
  modified_base (255): a, t, c, g, other or unknown
ttttttttgaaggtagcagtgcttttatttactttttattgtcatcaagcagttttctaggaattttcagcaaaataccaattcagctataagtctaatatgaaacacaggaactgtgaatataagcttttggtgcttgctatggaaaaatcaaatcaatagctttaatgtcttcttacaatctcattttgtttcactatagctctgttttagttagnatctgcacatctgttttgctccagggtagttaatttngccagttcagtttctctgtaggatttttgccataggtaggaaaagggattttaaatattaataggcc

SEQ ID NO: 609 - DNA, 872 bp, Homo sapiens
gcctgccggacgcctcccatgtcttccctgccggcaaggccatctgggtcacgggctggggacacacccagtatggaggcactggcgcgctgatcctgcaaaagggtgagatccgcgtcatcaaccagaccacctgcgagaacctcctgccgcagcagatcacgccgcgcatgatggtgattccgggggacccctgtccagcgtggaggcggatgggcggatcttccaggccggtgtggtgagctgggagacggctgcgctcagaggaacaagccaggcgtgtacacaaggctccctctgtttcgggactggatcaaagagaacactggggtataggggccggggccacccaaatgtgtacactgcggggccacccatcgtccaccccagtgtgcacgcctgcaggctggagactggaccgctgactgcaccagcgcccccagaacatacactgtgaactcaatctccagggctccaaatctgcctagaaaacctctcgcttcctcagcctccaaagtggagctgggaggtagaaggggaggacactggtggttctactgacccaactgggggcaaaggtttgaagacacagcctcccccgccagccccaagctgggccgaggcgcgtttgtgtatatctgcctcccctgtctgtaaggagcagcgggaacggagcttcggagcctcctcagtgaaggtggtggggctgccggatctgggctgtggggcccttgggccacgctcttgaggaagcccaggctcggaggaccctggaaaacagacgggtctgagactgaaattgttttaccagctcccagggtggacttcagtgtgtgtatttgtgtaaatgagtaaaacatttatttcttttt

SEQ ID NO: 610 - DNA, 239 bp, Homo sapiens
cagatctggatggagttgtgacctttgacttgtttaagtggttgcagctgaccatgtttgcatgaggcagggactcggtcccccttgccgtgctcccctccctcctcgtctgccaagcctcgcctcctaccacaccacaccaggccaccccagctgcaagtgccttccttggagcagagaggcagcctcgtcctcctgtcccctctcctcccagccaccatcgttcatctgctccgggc

SEQ ID NO: 611 - DNA, 612 bp, Homo sapiens
ggaagcagtgagcccaggagtcctcggccagccctgcctgcccaccaggaggatgaaggtctccgtggctgccctctcctgcctcatgcttgttactgcccttggatcccaggcccgggtcacaaaagatgcagagacagagttcatgatgtcaaagcttccattggaaaatccagtacttctggacatgctctggaggagaaagattggtcctcagatgaccctttctcatgctgcaggattccatgctactagtgctgactgctgcatctcctacaccccacgaagcatcccgtgttcactcctggagagttactttgaaacgaacagcgagtgctccaagccgggtgtcatcttcctcaccaagaaggggcgacgtttctgtgccaaccccagtgataagcaagttcaggtttgcatgagaatgctgaagctggacacacggatcaagaccaggaagaattgaacttgtcaaggtgaagggacacaagttgccagccaccaactttcttgcctcaactaccttcctgaattatttttttaagaagcatttattcttgtgttctggatttagagcaattcatctaataaacagtttctcacttaaaaaaa

SEQ ID NO: 612 - DNA, 994 bp, Homo sapiens
gtgcaggaggagaaggaggaggagcaggaggtggagattcccagttaaaaggctccagaatcgtgtaccaggcagagaactgaagtactggggcctcctccactgggtccgaatcagtaggtgaccccgcccctggattctggaagacctcaccatgggacgcccccgacctcgtgcggccaagacgtggatgttcctgctcttgctggggggagcctgggcaggacactccagggcacaggaggacaaggtgctggggggtcatgagtgccaaccccattcgcagccttggcaggcggccttgttccagggccagcaactactctgtggcggtgtccttgtaggtggcaactgggtccttacagctgcccactgtaaaaaaccgaaatacacagtacgcctgggagaccacagcctacagaataaagatggcccagagcaagaaatacctgtggttcagtccatcccacacccctgctacaacagcagcgatgtggaggaccacaaccatgatctgatgcttcttcaactgcgtgaccaggcatccctggggtccaaagtgaagcccatcagcctggcagatcattgcacccagcctggccagaagtgcaccgtctcaggctggggcactgtcaccagtccccgagagaattttcctgacactctcaactgtgcagaagtaaaaatctttccccagaagaagtgtgaggatgcttacccggggcagatcacagatggcatggtctgtgcaggcagcagcaaaggggctgacacgtgccagggcgattctggaggccccctggtgtgtgatggtgcactccagggcatcacatcctggggctcagacccctgtgggaggtccgacaaacctggcgtctataccaacatctgccgctacctggactggatcaagaagatcataggcagcaagggctgattctaggataagcactagatctcccttaataaactcacaactctctgaaaaaaaaaa

SEQ ID NO: 613 - DNA, 261 bp, Homo sapiens
  modified_base (28): a, t, c, g, other or unknown
  modified_base (35): a, t, c, g, other or unknown
  modified_base (219): a, t, c, g, other or unknown
  modified_base (250)..(251): a, t, c, g, other or unknown
cttctttgttaggctgtgtctccctaancccttgnccccacccagagtttcccgtccccttcactgatttctgttgtttctgctgactgtgtgggtggaatgtcccaagaaaagtgcatctgggaattgccagtccagctgggtagtcccaggctcctgtcttggggatgtttcccctgtcagcaagtaacctggtgaagtctattgaaggccagactncccccctagggtcactgcttcactagccgcnncccaccccag

SEQ ID NO: 614 - DNA, 622 bp, Homo sapiens
gtttgccattttctctttcctgatagagtacagctgagacccggacactggttagagggctaggtcgggtgttggccacttggaagataagattaggtttgccatccatgtgagctactactgctatgtcagtaaagcgaattgaaaaagctcgattttttggccgggcaatcttcgccacaaaagcacctaaataagaaattattgatttttttttagaatgaagactttaaatatcaatactttttctgaatgacaagtgtatatcaaatatttacacatttcttggtgccatgcctttcagtgagtcaggaattgaactcattgttaatttggtcagtcttatttgcctgaagcatttttcaaagtacatttctgtttaaaaaccatgatttcagaatagataagcaaaatgattttgttacagagaaatgtaaaacttcatcctctagtttcttacaaagtcaaagaattggtcatttcctatattcctgcctgtgcttaaaaaaaagtaatagaaaataaatgcaacttggctacagccagattacgttgaagtagagactaggttcagagtagaatgatttgggatggggaggggaccaatagaatgagtgatatt

SEQ ID NO: 615 - DNA, 2538 bp, Homo sapiens
  modified_base (2346)..(2366): a, t, c, g, other or unknown
aattcaccaggtaagttacaagaagatcaggtcttccttcatcagtaccactgacatcatcaaaagcagcatctttaaatgaaataactggcactgagtcatctgagcccctgctaatggtgtcctgagctttaaactctaccttgctttcactagtattaaaactcctagaagcactgtctccatctggaagagtaaagaatggtttcagtgcttctaggagttttaatactagtgaaagcaaggtagagtttaaagctcaggacaccattagcaggggctcagatgactcagtgccagttatttcatttaaagatgctgcttttgatgatgtcagtggtactgatgaaggaagacctgatcttcttgtaaatttacctggtgaattggagtcaacaagagaagctgcagcaatgggacctactaagtttacacaaactaatatagggataatagaaaataaactcttggaagcccctgatgttttatgcctcaggcttagtactgaacaatgccaagcacatgaggagaaaggcatagaggaactgagtgatccctctgggcccaaatcctatagtataacagagaaacactatgcacaggaggatcccaggatgttatttgtagcagctgttgatcatagtagttcaggagatatgtctttgttacccagctcagatcctaagtttcaaggacttggagtggttgagtcagcagtaactgcaaacaacacagaagaaagcttattccgtatttgtagtccactctcaggtgctaatgaatatattgcaagcacagacactttaaaaacagaagaagtattgctgtttacagatcagactgatgatttggctaaagaggaaccaacttctttattccagagagactctgagactaagggtgaaagtggtttagtgctagaaggagacaaggaaatacatcagatttttgaggaccttgataaaaaattagcactagcctccaggttttacatcccagagggctgcattcaaagatgggcagctgaaatggtggtagcccttgatgctttacatagagagggaattgtgtgccgcgatttgaacccaaacaacatcttattgaatgatagaggacacattcagctaacgtattttagcaggtggagtgaggttgaagattcctgtgacagcgatgccatagagagaatgtactgtgccccagaggttggagcaatcactgaagaaactgaagcctgtgattggtggagtttgggtgctgtcctctttgaacttctcactggcaagactctggttgaatgccatccagcaggaataaatactcacactactttgaacatgccagaatgtgtctctgaagaggctcgctcactcattcaacagctcttgcagttcaatcctctggaacgacttggtgctggagttgctggtgttgaagatatcaaatctcatccattttttacccctgtggattgggcagaactgatgagatgaacgtaatgcagggttatcttcacacattctgatcttctctgtgacaggcatctccagcactgaggcacctctgactcacagttacttatggagcaccaaagcatttggataaagaccgttataggaaatgggggggaaatggctaaaagagaacaattcgtttacaattacaagatattagctaattgtgccaggggctgttatatacatatatacacaaccaaggtgtgatctgaatttaatccacatttggtgttgcagatgagttgtaaagccaactgaaagagttccttcaagaagttcctctgataggaagctagaagtgtagaatgaagttttacttgacagaaggacctttacatggcagctaacagtgctttttgctgaccaggattggtttatatgattaaattaatatttgcttaataatacactaaaagtatatgaacaatgtcatcaatgaaacttaaaagcgagaaaaaagaatatacacataatttctgacggaaaacctgtaccctgatgctgtataatgtatgttgaatgtggtcccagattatttctgtaagaagacactccatgttgtcagctttgtactctttgttgatactgcttatttagagaagggttcatataaacactcactctgtgtcttcaacagcatctttctttccccatctttctattttctgcaccctctgcttgttccctcatattctgttcttccgactcctgctaacacacatgcaacaaaaaagggaagggagtgcttatttccctttgtgtaaggactaagaaatcatgatatcaaataaacatggtgaaacattagatctcttcttcatttaataannnnnnnnnnnnnnnnnnnnngaagaaatgcgtctgttcctttccttgtgaaatattatcagtttctaccattgcttctcatgcttgactttgttttactttttggcttggtatactaagaagcaaaggatctcatctaaatggaattgaatggcagtcctagtttgttacttatggtgatgagattttcaga

SEQ ID NO: 616 - DNA, 462 bp, Homo sapiens; identical to SEQ ID NO: 176

SEQ ID NO: 617 - DNA, 8490 bp, Homo sapiens
  modified_base (6774): a, t, c, g, other or unknown
  modified_base (7021): a, t, c, g, other or unknown
  modified_base (7227): a, t, c, g, other or unknown
  modified_base (7286): a, t, c, g, other or unknown
  modified_base (7300)..(7301): a, t, c, g, other or unknown
  modified_base (7477)..(7478): a, t, c, g, other or unknown
  modified_base (7538): a, t, c, g, other or unknown
  modified_base (8167): a, t, c, g, other or unknown
gccgctgagcctgcgcccagtgccccgagccccgcgccgagccgagtccgcgccaagcagcagccgcccaccccggggcccggccgggggaccagcagcttccccacaggcaacgtgaggagagcctgtgcccagaagcaggatgagaagatggcaaacttcctattacctcggggcaccagcagcttccgcaggttcacacgggagtccctggcagccatcgagaagcgcatggcggagaagcaagcccgcggctcaaccaccttgcaggagagccgagaggggctgcccgaggaggaggctccccggccccagctggacctgcaggcctccaaaaagctgccagatctctatggcaatccaccccaagagctcatcggagagcccctggaggacctggaccccttctatagcacccaaaagactttcatcgtactgaataaaggcaagaccatcttccggttcagtgccaccaacgccttgtatgtcctcagtcccttccaccccatccggagagcggctgtgaagattctggttcactcgctcttcaacatgctcatcatgtgcaccatcctcaccaactgcgtgttcatggcccagcacgaccctccaccctggaccaagtatgtcgagtacaccttcaccgccatttacacctttgagtctctggtcaagattctggctcgaggcttctgcctgcacgcgttcactttccttcgggacccatggaactggctggactttagtgtgattatcatggcatacacaactgaatttgtggacctgggcaatgtctcagccttacgcaccttccgagtcctccgggccctgaaaactatatcagtcatttcagggctgaagaccatcgtgggggccctgatccagtctgtgaagaagctggctgatgtgatggtcctcacagtcttctgcctcagcgtctttgccctcatcggcctgcagctcttcatgggcaacctaaggcacaagtgtgtgcgcaacttcacagcgctcaacggcaccaacggctccgtggaggccgacggcttggtctgggaatccctggacctttacctcagtgatccagaaaattacctgctcaagaacggcacctctgatgtgttactgtgtgggaacagctctgacgctgggacatgtccggagggctaccggtgcctaaaggcaggcgagaaccccgaccacggctacaccagcttcgattcctttgcctgggcctttcttgcactcttccgcctgatgacgcaggactgctgggagcgcctctatcagcagaccctcaggtccgcagggaagatctacatgatcttcttcatgcttgtcatcttcctggggtccttctacctggtgaacctgatcctggccgtggtcgcaatggcctatgaggagcaaaaccaagccaccatcgctgagaccgaggagaaggaaaagcgcttccaggaggccatggaaatgctcaagaaagaacacgaggccctcaccatcaggggtgtggataccgtgtcccgtagctccttggagatgtcccctttggccccagtaaacagccatgagagaagaagcaagaggagaaaacggatgtcttcaggaactgaggagtgtggggaggacaggctccccaagtctgactcagaagatggtcccagagcaatgaatcatctcagcctcacccgtggcctcagcaggacttctatgaagccacgttccagccgcgggagcattttcacctttcgcaggcgagacctgggttctgaagcagattttgcagatgatgaaaacagcacagcgggggagagcgagagccaccacacatcactgctggtgccctggcccctgcgccggaccagtgcccagggacagcccagtcccggaacctcggctcctggccacgccctccatggcaaaaagaacagcactgtggactgcaatggggtggtctcattactgggggcaggcgacccagaggccacatccccaggaagccacctcctccgccctgtgatgctagagcacccgccagacacgaccacgccatcggaggagccaggcggcccccagatgctgacctcccaggctccgtgtgtagatggcttcgaggagccaggagcacggcagcgggccctcagcgcagtcagcgtcctcaccagcgcactggaagagttagaggagtctcgccacaagtgtccaccatgctggaaccgtctcgcccagcgctacctgatctgggagtgctgcccgctgtggatgtccatcaagcagggagtgaagttggtggtcatggacccgtttactgacctcaccatcactatgtgcatcgtactcaacacactcttcatggcgctggagcactacaacatgacaagtgaattcgaggagatgctgcaggtcggaaacctggtcttcacagggattttcacagcagagatgaccttcaagatcattgccctcgacccctactactacttccaacagggctggaacatcttcgacagcatcatcgtcatccttagcctcatggagctgggcctgtcccgcatgagcaacttgtcggtgctgcgctccttccgcctgctgcgggtcttcaagctggccaaatcatggcccaccctgaacacactcatcaagatcatcgggaactcagtgggggcactggggaacctgacactggtgctagccatcatcgtgttcatctttgctgtggtgggcatgcagctctttggcaagaactactcggagctgagggacagcgactcaggcctgctgcctcgctggcacatgatggacttctttcatgccttcctaatcatcttccgcatcctctgtggagagtggatcgagaccatgtgggactgcatggaggtgtcggggcagtcattatgcctgctggtcttcttgcttgttatggtcattggcaaccttgtggtcctgaatctcttcctggccttgctgctcagctccttcagtgcagacaacctcacagcccctgatgaggacagagagatgaacaacctccagctggccctggcccgcatccagaggggcctgcgctttgtcaagcggaccacctgggatttctgctgtggtctcctgcggcaccggcctcagaagcccgcagcccttgccgcccagggccagctgcccagctgcattgccaccccctactccccgccacccccagagacggagaaggtgcctcccacccgcaaggaaacacagtttgaggaaggcgagcaaccaggccagggcacccccggggatccagagcccgtgtgtgtgcccatcgctgtggccgagtcagacacagatgaccaagaagaggatgaggagaacagcctgggcacggaggaggagtccagcaagcagcaggaatcccagcctgtgtccggctggcccagaggccctccggattccaggacctggagccaggtgtcagcgactgcctcctctgaggccgaggccagtgcatctcaggccgactggcggcagcagtggaaagcggaaccccaggccccagggtgcggtgagaccccagaggacagttgctccgagggcagcacagcagacatgaccaacaccgctgagctcctggagcagatccctgacctcggccaggatgtcaaggacccagaggactgcttcactgaaggctgtgtccggcgctgtccctgctgtgcggtggacaccacacaggccccagggaaggtctggtggcggttgcgcaagacctgctaccacatcgtggagcacagctggttcgagacattcatcatcttcatgatcctactcagcagtggagcgctggccttcgaggacatctacctagaggagcggaagaccatcaaggttctgcttgagtatgccgacaagatgttcacatatgtcttcgtgctggagatgctgctcaagtgggtggcctacggcttcaagaagtacttcaccaatgcctggtgctggctcgacttcctcatcgtagacgtctctctggtcagcctggtggccaacaccctgggctttgccgagatgggccccatcaagtcactgcggacgctgcgtgcactccgtcctctgagagctctgtcacgatttgagggcatgagggtggtggtcaatgccctggtgggcgccatcccgtccatcatgaacgtcctcctcgtctgcctcatcttctggctcatcttcagcatcatgggcgtgaacctctttgcggggaagtttgggaggtgcatcaaccagacagagggagacttgcctttgaactacaccatcgtgaacaacaagagccagtgtgagtccttgaacttgaccggagaattgtactggaccaaggtgaaagtcaactttgacaacgtgggggccgggtacctggcccttctgcaggtggcaacatttaaaggctggatggacattatgtatgcagctgtggactccagggggtatgaagagcagcctcagtgggaatacaacctctacatgtacatctattttgtcattttcatcatctttgggtctttcttcaccctgaacctctttattggtgtcatcattgacaacttcaaccaacagaagaaaaagttagggggccaggacatcttcatgacagaggagcagaagaagtactacaatgccatgaagaagctgggctccaagaagccccagaagcccatcccacggcccctgaacaagtaccagggcttcatattcgacattgtgaccaagcaggcctttgacgtcaccatcatgtttctgatctgcttgaatatggtgaccatgatggtggagacagatgaccaaagtcctgagaaaatcaacatcttggccaagatcaacctgctctttgtggccatcttcacaggcgagtgtattgtcaagctggctgccctgcgccactactacttcaccaacagctggaatatcttcgacttcgtggttgtcatcctctccatcgtgggcactgtgctctcggacatcatccagaagtacttcttctccccgacgctcttccgagtcatccgcctggcccgaataggccgcatcctcagactgatccgaggggccaaggggatccgcacgctgctctttgccctcatgatgtccctgcctgccctcttcaacatcgggctgctgctcttcctcgtcatgttcatctactccatctttggcatggccaacttcgcttatgtcaagtgggaggctggcatcgacgacatgttcaacttccagaccttcgccaacagcatgctgtgcctcttccagatcaccacgtcggccggctgggatggcctcctcagccccatcctcaacactgggccgccctactgcgaccccactctgcccaacagcaatggctctcggggggactgcgggagcccagccgtgggcatcctcttcttcaccacctacatcatcatctccttcctcatcgtggtcaacatgtacattgccatcatcctggagaacttcagcgtggccacggaggagagcaccgagcccctgagtgaggacgacttcgatatgttctatgagatctgggagaaatttgacccagaggccactcagtttattgagtattcggtcctgtctgactttgccgacgccctgtctgagccactccgtatcgccaagcccaaccagataagcctcatcaacatggacctgcccatggtgagtggggaccgcatccattgcatggacattctctttgccttcaccaaaagggtcctgggggagtctggggagatggacgccctgaagatccagatggaggagaagttcatggcagccaacccatccaagatctcctacgagcccatcaccaccacactccggcgcaagcacgaagaggtgtcggccatggttatccagagagccttccgcaggcacctgctgcaacgctctttgaagcatgcctccttcctcttccgtcagcaggcgggcagcggcctctccgaagaggatgcccctgagcgagagggcctcatcgcctacgtgatgagtgagaacttctcccgaccccttggcccaccctccagctcctccatctcctccacttccttcccaccctcctatgacagtgtcactagagccaccagcgataacctccaggtgcgggggtctgactacagccacagtgaagatctcgccgacttccccccttctccggacagggaccgtgagtccatcgtgtgagcctcggcctggctggccaggacacactgaaaagcagcctttttcaccatggcaaacctaaatgcagtcagtcacaaaccagcctggggccttcctggctttgggagtaagaaatgggcctcggccccgcggatcaaccaggcagagttctgtggcgccgcgtggacagccggagcagttggcctgtgcttggaggcctcagatagacctgtgacctggtctggtcaggcaatgcccctgcggctctggaaagcaacttcatcccagctgctgaggcgaaatataaaactgagactgtatatgttgtgaatgggctttcataaatttattatatttgatatttttttacttgagcaaagaactaaggatttttccatggacatgggcagcaattcacgctgtctcttcttaaccctgaacaagagtgtctatggagcagccggaagtctgttctcaaagcagaagtggaatccagtgtggctcccacaggtcttcactgcccaggggtcgaatggggtccccctcccacttgatgagatgctgggagggctgaacccccactcacacaagcanacacacacagtcctcacacacggaggccagacacaggccgtgggacccaggctcccagcctaagggagacaggcctttccctgccggccccccaaggatggggttcttgtccacggggctcactctggccccctattgtctccaaggtcccattttccccctgtgttttcacgcaggtcatattgtcagtcctacaaaaataaaaggcttccagaggagagtggcctggggtcccagggctgggccntaggcactgatagttgccttttcttcccctcctgtaagagtattaacaaaaccaaaggacacaagggtgcaagccccattcacggcctggcatgcagcttgtccttgctcctggaacctggcaggccctgccagccagccaatggaagagaggggctgagccatgggggtttggggctaagaagttcaccagccctgagccatggnccctcagcctgcctgaagagaggaaactggcgatctcccagggctctctggaccatacncggaggagttttcnngtgtggtctccagctcctctccagacacagagacatgggagtggggagcggacgttggccctggccctgtgcagggaaagggatggtcaggcccagttctcgtgccccttagaggggaatgaaccatggcacctttgagagagggggcactgtggtcaggcccagcctctctggcnnagtcccgggatcctgatggcacccacacagaggacctctttggggcaagatccaggtggntcccataggtcttgtgaaaaggctttttcagggaaaaatattttactagtccaatcacccccaggacctcttcagctgcgacaatcctatttagcatatgcaaatcttttaacatagagaactgtcaccctgaggtaacagggtcaactggcgaagctgaagcaggcaggggcttggctgccccattccagctctcccacggagcccctccaaccgggcgcatgctcccaggccacctcagtctcacctgccggctctgggctggctgctcctaacctacctcgccgagctgtcggagggctggacatttgtggcagtgctgaagggggcattgccggcgagtaaagtattatgtttcttcttgtcaccccagttcccttggtggcaaccccagacccaacccatgcccctgacagatctagttctcttctcctgtgttccctttgagtccagtgtgggacacggtttaactgtcccagcgacatttctccaagtggaaatcctatttttgtagatctccatgctttgctctcaaggcttggagaggtatgtgcccctcctgggtgctcaccgcctgctacacaggcaggaatgcggttgggaggcaggtcgggctgccagcccagctngccggaaggagactgtggtttttgtgtgtgtggacagcccgggagctttgagacaggtgcctggggctggctgcagacggtgtggttgggggtgggaggtgagctagacccaacccttagcttttagcctggctgtcacctttttaatttccagaactgcacaatgaccagcaggaggggagaagagagtaggaaaaaggagggaaggacagacatcaagtgccagatgttgtctgaactaatcgagcacttctcaccaaacttcatgtataaataaaatacatatttttaaaacaaaccaataaatggcttacatgacctgg

SEQ ID NO: 618 - DNA, 2996 bp, Homo sapiens
tgaaatataggtgagagacaagattgtctcatatccggggaaatcataacctatgactaggacgggaagaggaagcactgcctttacttcagtgggaatctcggcctcagcctgcaagccaagtgttcacagtgagaaaagcaagagaataagctaatactcctgtcctgaacaaggcagcggctccttggtaaagctactccttgatcgatcctttgcaccggattgttcaaagtggaccccaggggagaagtcggagcaaagaacttaccaccaagcagtccaagaggcccagaagcaaacctggaggtgagacccaaagaaagctggaaccatgctgactttgtacactgtgaggacacagagtctgttcctggaaagcccagtgtcaacgcagatgaggaagtcggaggtccccaaatctgccgtgtatgtggggacaaggccactggctatcacttcaatgtcatgacatgtgaaggatgcaagggctttttcaggagggccatgaaacgcaacgcccggctgaggtgccccttccggaagggcgcctgcgagatcacccggaagacccggcgacagtgccaggcctgccgcctgcgcaagtgcctggagagcggcatgaagaaggagatgatcatgtccgacgaggccgtggaggagaggcgggccttgatcaagcggaagaaaagtgaacggacagggactcagccactgggagtgcaggggctgacagaggagcagcggatgatgatcagggagctgatggacgctcagatgaaaacctttgacactaccttctcccatttcaagaatttccggctgccaggggtgcttagcagtggctgcgagttgccagagtctctgcaggccccatcgagggaagaagctgccaagtggagccaggtccggaaagatctgtgctctttgaaggtctctctgcagctgcggggggaggatggcagtgtctggaactacaaacccccagccgacagtggcgggaaagagatcttctccctgctgccccacatggctgacatgtcaacctacatgttcaaaggcatcatcagctttgccaaagtcatctcctacttcagggacttgcccatcgaggaccagatctccctgctgaagggggccgctttcgagctgtgtcaactgagattcaacacagtgttcaacgcggagactggaacctgggagtgtggccggctgtcctactgcttggaagacactgcaggtggcttccagcaacttctactggagcccatgctgaaattccactacatgctgaagaagctgcagctgcatgaggaggagtatgtgctgatgcaggccatctccctcttctccccagaccgcccaggtgtgctgcagcaccgcgtggtggaccagctgcaggagcaattcgccattactctgaagtcctacattgaatgcaatcggccccagcctgctcataggttcttgttcctgaagatcatggctatgctcaccgagctccgcagcatcaatgctcagcacacccagcggctgctgcgcatccaggacatacacccctttgctacgcccctcatgcaggagttgttcggcatcacaggtagctgagcggctgcccttgggtgacacctccgagaggcagccagacccagagccctctgagccgccactcccgggccaagacagatggacactgccaagagccgacaatgccctgctggcctgtctccctagggaattcctgctatgacagctggctagcattcctcaggaaggacatgggtgccccccacccccagttcagtctgtagggagtgaagccacagactcttacgtggagagtgcactgacctgtaggtcaggaccatcagagaggcaaggttgccctttccttttaaaaggccctgtggtctggggagaaatccctcagatcccactaaagtgtcaaggtgtggaagggaccaagcgaccaaggatgggccatctggggtctatgcccacatacccacgtttgttcgcttcctgagtcttttcattgctacctctaatagtcctgtctcccacttcccactcgttcccctcctcttccgagctgctttgtgggctccaggcctgtactcatcggcaggtgcatgagtatctgtgggagtcctctagagagatgagaagccaggaggcctgcaccaaatgtcagaagcttggcatgacctcattccggccacatcattctgtgtctctgcatccatttgaacacattattaagcaccgataataggtagcctgctgtggggtatacagcattgactcagatatagatcctgagctcacagagtttatagttaaaaaaacaaacagaaacacaaacaatttggatcaaaaggagaaatgataagtgacaaaagcagcacaaggaatttccctgtgtggatgctgagctgtgatggcgggcactgggtacccaagtgaaggttcccgaggacatgagtctgtaggagcaagggcacaaactgcagctgtgagtgcgtgtgtgtgatttggtgtaggtaggtctgtttgccacttgatggggcctgggtttgttcctggggctggaatgctgggtatgctctgtgacaaggctacgctgacaatcagttaaacacaccggagaagaaccatttacatgcaccttatatttctgtgtacacatctattctcaaagctaaagggtatgaaagtgcctgccttgtttatagccacttgtgagtaaaaatttttttgcattttcacaaattatactttatataaggcattccacacctacgaactagttttgggaaatgtagccctgggtttaatgtcaaatcaaggcaaaaggaattaaataatgtacttttggctagaggggtaaacttttttggcctttttctggggaaaataatgtgggggtgtggaaatagaaacatacgcaagcatacatatttttactacttattttattattatcctgtataaat

SEQ ID NO: 619 - DNA, 2675 bp, Homo sapiens
gtccaataataacctaagtaatttacctcagggtatctttgatgatttggacaatataacacaactgattcttcgcaacaatccctggtattgcgggtgcaagatgaaatgggtacgtgactggttacaatcactacctgtgaaggtcaacgtgcgtgggctcatgtgccaagccccagaaaaggttcgtgggatggctattaaggatctcaatgcagaactgtttgattgtaaggacagtgggattgtaagcaccattcagataaccactgcaatacccaacacagtgtatcctgcccaaggacagtggccagctccagtgaccaaacagccagatattaagaaccccaagctcactaaggatcaacaaaccacagggagtccctcaagaaaaacaattacaattactgtgaagtctgtcacctctgataccattcatatctcttggaaacttgctctacctatgactgctttgagactcagctggcttaaactgggccatagcccggcatttggatctataacagaaacaattgtaacaggggaacgcagtgtgtacttggtcacagccctggagcctgattcaccctataaagtatgcatggttcccatggaaaccagcaacctctacctatttgatgaaactcctgtttgtattgagactgaaactgcaccccttcgaatgtacaaccctacaaccaccctcaatcgagagcaagagaaagaaccttacaaaaaccccaatttacctttggctgccatcattggtggggctgtggccctggttaccattgcccttcttgctttagtgtgttggtatgttcataggaatggatcgctcttctcaaggaactgtgcatatagcaaagggaggagaagaaaggatgactatgcagaagctggcactaagaaggacaactctatcctggaaatcagggaaacttcttttcagatgttaccaataagcaatgaacccatctcgaaggaggagtttgtaatacacaccatatttcctcctaatggaatgaatctgtacaaaaacaatcacagtgaaagcagtagtaaccgaagctacagagacagtggtattccagactcagatcactcacactcatgatgctgaaggactcacagcagacttgtgttttgggttttttaaacctaagggaggtgatggtaggaaccctgttctactgcaaaacactggaaaaagagactgaaaaaaagcaatgtactgtacatttgccatataatttatatttaagaactttttattaaaagtttcaaatttcaggttactgctgcgattgatgtagtggagatgcctgaacacaattctatattttagtattttttagtaatttgtactgtattttccttgcaaatattggagttataaaccatttactttgtgttctactgagtaagatgacttgttgactgtgaaagtgaattttcttgctgtgtcgaacaatcaggactgcattcatatgagatccttgtagtataagcacaggccatttttcactttggtattaataaaatgtaaaaaaaaaaaactggctgaatggctgaatgagataaaatttaattttaaaaaatggttatgaaataatgttccaattattaaatttgtattatcccagtggtattcaataaatcaaaatgtgtgaagtaatgggcaatatcaaacttcctgcatatctccatttttgctctaggcaaattaattatccttaaaaaagttaagcatatcttctgaactgaatacatcagctggcataaaaggagcatgaagtctgttaaagccattgtcagcaaagctttgaaaataaaggacttcacaaaaacggtaatgtaaatgtgcttccaagttggggggaaaatgtgtacttaggaaaacatggaaacttagacttgtatagtgtaatgaacacaaataccaaaactgcattttggttttgcctataccatcctgatttttgaaaagtgaattataaacacaaaattgttagtgtttatgatgtttttatcataaaggatgtcagagaaactttatgcatattaaaaatgtaatgtaattataagcgattcccctcaacaatccagagaaagtagttctttaaataagagataatttaaagaaaaataaatactagacatcaaatttagatctggtttatgtcaaaggttttaacactgtacataaatgttcaatttacttttacaaagatcaagaatactgcccattactgtcacaattttccagatattatataatgaactcgtaatgtaacatttccttctagcttcctactgaattgtgagctgttacttgttgaaaaaccatatcacttttctgttgccatgattttttttttcaacaaaaaaccaaagtgcattgtacgccctttggccagtcttgtatgtgccttgatccaacgctacatgtattcagcttttaaaactccacaaatttttcatactccttaaatatgaaaaattatggtcttattgctgaataaaacttttaaaaagtacagaataattgtgcttgctttttcaggattgtgttactatcactaagtagcaaattgcccagcacattagtcctaaacgtcccatgtatttttctaggcataaaaataaaagttggctaaaaattttaaaaaatc

SEQ ID NO: 620 - DNA, 2571 bp, Homo sapiens
gatggctgcgcggtgctccacacgctggttgctggtggttgtggggaccccgcggctgccggctatatcgggtagaggggcccggccgcccagggagggcgtggtgggggcatggctgagccgcaagctgagcgtccccgcctttgcgtcttccctgacctcttgcggcccccgagcgctgctgacattgagacctggtgtcagcctcacaggaacaaaacattaccctttcatttgtactgcctccttccacacgagtgcccctttggccaaagaagattattatcagatattaggagtgcctcgaaatgccagccagaaagagatcaagaaagcctattatcagcttgccaagaagtatcaccctgacacaaataaggatgatcccaaagccaaggagaagttctcccagctggcagaagcctatgaggttttgagtgatgaggtgaagaggaagcagtacgatgcctacggctctgcaggcttcgatcctggggccagcggctcccagcatagctactggaagggaggccccactgtggaccccgaggagctgttcaggaagatctttggcgagttctcatcctcttcatttggagatttccagaccgtgtttgatcagcctcaggaatacttcatggagttgacattcaatcaagctgcaaagggggtcaacaaggagttcaccgtgaacatcatggacacgtgtgagcgctgcaacggcaaggggaacgagcccggcaccaaggtgcagcattgccactactgtggcggctccggcatggaaaccatcaacacaggcccttttgtgatgcgttccacgtgtaggagatgtggtggccgcggctccatcatcatatcgccctgtgtggtctgcaggggagcaggacaagccaagcagaaaaagcgagtgatgatccctgtgcctgcaggagtcgaggatggccagaccgtgaggatgcctgtgggaaaaagggaaattttcattacgttcagggtgcagaaaagccctgtgttccggagggacggcgcagacatccactccgacctctttatttctatagctcaggctcttcttgggggaacagccagagcccagggcctgtacgagacgatcaacgtgacgatcccccctgggactcagacagaccagaagattcggatgggtgggaaaggcatcccccggattaacagctacggctacggagaccactacatccacatcaagatacgagttccaaagaggctaacgagccggcagcagagcctgatcctgagctacgccgaggacgagacagatgtggaggggacggtgaacggcgtcaccctcaccagctctggaaaaagatccactggaaactaggccgggaagcagcagcccctccaagggccagggcacctgggagacgggaggattccagaacagcagcactgagctcccacccgcagagcctctggacggccttggcaacagcaaaatcatgggacaacacctctctccacggaaaggtcacagtggacagcccgggcagtaggatgcagccccagaggctggtggcagtttcctgtccattggtaggtgacggcccctggctcaggcagagggagatggttagactcttgcagggctaaaactctaatttggaattgaatattgtggatatcttagttaaaggccatgcttacagcttagaaatgaagccttaagctgcatcaagttacgaagtgattaatttccttctcagcaaacctccgggaggttccagaatgagttcttcctgacaggttgtcttcactgggagcgtggggcccccaggccccaccagcaccgtcctcccctaatgaggggccctgccgaggcatcagctgctctgctcagttagtttttattcccggggtaccaagcagctgcacagtcggtgcctgggaggcacgtagaggcccagagagtccctgggggttctgctctgaccgtgtgggtggtgatccttgtcaggatgtacagtccttgctcccaccccatccaggatggccgcctgtccctgactattgagtcctgttgttgtaagccaggcatggagggctcctgcccttctgctgagccacagcccattgcagcactgtgctggccagacttcagctgccttgggaactgaagccctgccactgttgctagtcaggggcttggttctcccacttacactgttgacatctattttctgaagtgtgtttaaattattcagtgctaatcattgttttttcctttgtaaatgttgattcagaaaaggaaagcacaggctaagcagttgaaggttccccaccattcagtgagagcagaacccccattccccagcctctgctggtagcatgtcgcagtttccatgtgtttcaggatcttcgggctgtcgttagacaggttaatgaagaacacttctcaacagtttcctttttgttttcctttataattcactaaaataaagcatctattagtgtctgatttaggaatgtaaaatgattctgtattaatgtaaataagattatctattgcaaaaagatatttcaaacctaaaa

SEQ ID NO: 621 - DNA, 988 bp, Homo sapiens
gtgcaggaggagaaggaggaggagcaggaggtggagattcccagttaaaaggctccagaatcgtgtaccaggcagagaactgaagtactggggcctcctccactgggtccgaatcagtaggtgaccccgcccctggattctggaagacctcaccatgggacgcccccgacctcgtgcggccaagacgtggatgttcctgctcttgctggggggagcctgggcaggacactccagggcacaggaggacaaggtgctggggggtcatgagtgccaaccccattcgcagccttggcaggcggccttgttccagggccagcaactactctgtggcggtgtccttgtaggtggcaactgggtccttacagctgcccactgtaaaaaaccgaaatacacagtacgcctgggagaccacagcctacagaataaagatggcccagagcaagaaatacctgtggttcagtccatcccacacccctgctacaacagcagcgatgtggaggaccacaaccatgatctgatgcttcttcaactgcgtgaccaggcatccctggggtccaaagtgaagcccatcagcctggcagatcattgcacccagcctggccagaagtgcaccgtctcaggctggggcactgtcaccagtccccgagagaattttcctgacactctcaactgtgcagaagtaaaaatctttccccagaagaagtgtgaggatgcttacccggggcagatcacagatggcatggtctgtgcaggcagcagcaaaggggctgacacgtgccagggcgattctggaggccccctggtgtgtgatggtgcactccagggcatcacatcctggggctcagacccctgtgggaggtccgacaaacctggcgtctataccaacatctgccgctacctggactggatcaagaagatcataggcagcaagggctgattctaggataagcactagatctcccttaataaactcacaactctctggttc

SEQ ID NO: 622 - DNA, 1554 bp, Homo sapiens
  modified_base (1544): a, t, c, g, other or unknown
cccacgcgtccgctcacctccgagccacctctgctgcgcaccgcagcctcggacctacagcccaggatactttgggacttgccggcgctcagaaacgcgcccagacggcccctccaccttttgtttgcctagggtcgccgagagcgcccggagggaaccgcctggccttcggggaccaccaattttgtctggaaccaccctcccggcgtatcctactccctgtgccgcgaggccatcgcttcactggaggggtcgatttgtgtgtagtttggtgacaagatttgcattcacctggcccaaaccctttttgtctctttgggtgaccggaaaactccacctcaagttttcttttgtgggggctgccccccaagtgtcgtttgttttactgtagggtctccccgcccggcgcccccagtgttttctgagggcggaaatggccaattcgggcctgcagttgctgggcttctccatgggccctgctgggctgggtgggtctggtggcctgcaccgccatcccgcagtggcagatgagctcctatgcgggtgacaacatcatcacggcccaggccatgtacaaggggctgtggatggactgcgtcacgcagagcacggggatgatgagctgcaaaatgtacgactcggtgctcgccctgtccgcggccttgcaggccactcgagccctaatggtggtctccctggtgctgggcttcctggccatgtttgtggccacgatgggcatgaagtgcacgcgctgtgggggagacgacaaagtgaagaaggcccgtatagccatgggtggaggcataattttcatcgtggcaggtcttgccgccttggtagcttgctcctggtatggccatcagattgtcacagacttttataaccctttgatccctaccaacattaagtatgagtttggccctgccatctttattggctgggcagggtctgccctagtcatcctgggaggtgcactgctctcctgttcctgtcctgggaatgagagcaaggctgggtaccgtgtaccccgctcttaccctaagtccaactcttccaaggagtatgtgtgacctgggatctccttgccccagcctgacaggctatgggagtgtctagatgcctgaaagggcctggggctgagctcagcctgtgggcagggtgccggacaaaggcctcctggtcactctgtccctgcactccatgtatagtcctcttgggttgggggtgggggggtgccgttggtgggagagacaaaaagagggagagtgtgctttttgtacagtaataaaaaataagtattgggaagcaggcttttttcccttcagggcctctgctttcctcccgtccagatccttgcagggagcttggaaccttagtgcacctacttcagttcagaacacttagcaccccactgactccactgacaattgactaaaagatgcaggtgctcgtatctcgacattcattcccacccccctcttatttaaatagctaccaaagtacttcttttttaataaaaaaataaagatttttattaggtaaanaaaaaaaaaa

SEQ ID NO: 623 - DNA, 246 bp, Homo sapiens
gcttattcactttgtgttttcttttgttttattttgtccaattttgtctttagctgtgtttattaacttctccggtcttgttttgttttaatgctcttggcccagtgggtgtcaagaacactggcttaattcaagtcagttgattttttttctattaaaactgttgttaaaatattttttaaaacaaaaacattatttgtgccctcttttatatatgtcaaagggacactgtcaagtatttcattt

SEQ ID NO: 624 - DNA, 4395 bp, Homo sapiens
  modified_base (1933): a, t, c, g, other or unknown
  modified_base (2111): a, t, c, g, other or unknown
  modified_base (2145): a, t, c, g, other or unknown
  modified_base (2160): a, t, c, g, other or unknown
  modified_base (2176): a, t, c, g, other or unknown
  modified_base (2213): a, t, c, g, other or unknown
  modified_base (2809)..(2866): a, t, c, g, other or unknown
  modified_base (3231)..(3273): a, t, c, g, other or unknown
gtgtgctggcaaagtgcttggctgcgcggcgtctgcaggcgccaccgctgcctctttccggctgtgaccctcctcgccgccgccgcttcgctgcgtcctccgactccccgcgccgccgagaccaggctcccgctccggttgcggccgcaccgccctccgcggccgccccctggggatccagcgagcgcggtcgtccttggtggaaggaaccatgaactggcatctccccctcttcctcttggcctctgtgacgctgccttccatctgctcccacttcaatcctctgtctctcgaggaactaggctccaacacggggatccaggttttcaatcagattgtgaagtcgaggcctcatgacaacatcgtgatctctccccatgggattgcgtcggtcctggggatgcttcagctgggggcggacggcaggaccaagaagcagctcgccatggtgatgagatacggcgtaaatggagttggtaaaatattaaagaagatcaacaaggccatcgtctccaagaagaataaagacattgtgacagtggctaacgccgtgtttgttaagaatgcctctgaaattgaagtgccttttgttacaaggaacaaagatgtgttccagtgtgaggtccggaatgtgaactttgaggatccagcctctgcctgtgattccatcaatgcatgggttaaaaatgaaaccagggatatgattgacaatctgctgtccccagatcttattgatggtgtgctcaccagactggtcctcgtcaacgcagtgtatttcaagggtctgtggaaatcacggttccaacccgagaacacaaagaaacgcactttcgtggcagccgacgggaaatcctatcaagtgccaatgctggcccagctctccgtgttccggtgtgggtcgacaagtgcccccaatgatttatggtacaacttcattgaactgccctaccacggggaaagcatcagcatgctgattgcactgccgactgagagctccactccgctgtctgccatcatcccacacatcagcaccaagaccatagacagctggatgagcatcatggtgcccaagagggtgcaggtgatcctgcccaagttcacagctgtagcacaaacagatttgaaggagccgctgaaagttcttggcattactgacatgtttgattcatcaaaggcaaattttgcaaaaataacaaggtcagaaaacctccatgtttctcatatcttgcaaaaagcaaaaattgaagtcagtgaagatggaaccaaagcttcagcagcaacaactgcaattctcattgcaagatcatcgcctccctggtttatagtagacagaccttttctgtttttcatccgacataatcctacaggtgctgtgttattcatggggcagataaacaaaccctgaagagtatacaaaagaaaccatgcaaagcaacgactactttgctacgaagaaagactcctttcctgcatctttcatagttctgttaaatatttttgtacatcgcttctttttcaaaactagttcttaggaacagactcgatgcaagtgtttctgttctgggaggtattggagggaaaaaacaagcaggatggctggaacactgtactgaggaatgaatagaaaggcttccagatgtctaaaagattctttaaactactgaactgttacctaggttaacaaccctgttgagtatttgctgtttgtccagttcaggaatttttgttttgttttgtctatatgtgcggcttttcagaagaaatttaatcagtgtgacagaaaaaaaaatgttttatggtagcttttactttttatgaaaaaaaaattatttgccttttaaattcttttcccccatccccctccaaagtcttgatagcaagcgttattttgggggtagaaacggtgaaatctctagcctctttgtgtttttgntgatgctgttgttgttgttttatataatgcatgtattcactaaaataaaatttaaaaaactcctgtcttgctagacaaggttgctgttgtgcagtgtgacagaaaaaaaaatgttttatggtagcttttactttttatgaaaaaaaaattatttggcttttaaattcttttcccccanccccctccaaagtcttgatagcaagcgttatttngggggtagaaacggngaaatctctagcctcnnnnnnnnnnnnnnnnnnnnnnnnnnnnnnnnnnnnnntaatgcatgtattcactaaaataaaatttaaaaaactcgaaggctgctcagggccttataaaactgttgtagacagccctgaatgtcccctgcttcccaccacccagagcctgggatcatgcaagctgggagagaagctacagaggtagtgccgtgtttggtggagtgacctctgcagcctccctccctcagagtgagaattttatgtaattcttatctgcagttgggaataaaagaagtttgattcctagacactgaaatacacgaaagtttatcatgccacccttttccatctcttaggagaaatggaaaaagaacactccaaacctggccactacctgaggatgtgtaaagaggttttctgcaggcaattagaccccactacagtggaagcttgtagaacatcacacatcgacagtctgaaatgcaccacaagaactgctcgaagagtgtgtcactttcacacttacctgaccgtgggatggaagtgcagcgtaagccatgggctgattcatcactcctttctgcttcatgagaagcaggcgtttctggtcttcgctcaggtgtgccctgggggcctggagctgtggaggtgnnnnnnnnnnnnnnnnnnnnnnnnnnnnnnnnnnnnnnnnnnnnnnnnnnnnnnnnnngatatacggcatcaaggggtttttgttggggttggccactggtggtgtcatcctctgactcaggtctgcattgaagtgggtcaggggtttagtgttgccataagtcagaatattgtgctgtttgtttaaggagtttgtacccaagttatttggctgctgattgatcatattcatgtgattctgagggaggtagttattcattgttgtcttctgcaggttgtttgccattggaggcactatagggttttggttgttaaaggcttgggggtacatcattgggctatttggtttttctgcagtaaaagctgctccatatggactagagggaggtcctaagggagaccaatttgaagtctgatttgagnnnnnnnnnnnnnnnnnnnnnnnnnnnnnnnnnnnnnnnnnnngtttctgctgcatgagtttggccctttgttgctgctgtgcagccatctgtttgagctgttctgctggagacatgtcagagctgggcacagccacaggccctgacgctgaaccggccactgtcactgctgccggattcaggagataaccatttccaggccgaggtggagcttggcctggagtgtgggcttggtttggagtttgaggggactggacagcacagtttgctggtgagcttgcagggtttggagctgcgggagtgctggcaacagaaggtaaactagtggccgtggagacagtagaaaaggggaaggaacccaaggaaggaagaaggcccttcgccctgggggagatcccatggagacatgtgcgaagggagagtgagaggggtcgctcttcacgctcgcactctcctgggagagaggggtctcagttgctggctgcgagaattctggctccttcttctcttcaaagtcttcgttgaacaggtcctgtatgtcatcctcaggaaccgtgttgtccaattcatctattaattcttgccactcctgatcattcagattaatgtctgagaacagcttgttctgatttgaaagagatgtttctgatgtgtctatgcaagtagggtcatcgagaggttcttgtttgaggtctttgctctgcaagatggtgaagctatcctccaggtcactgcaaccgttgacaggaagtttaatctcagggagcctaccattcttacttagatcttctagaagcccaggagtgtgagttccactgttctgcaagggcaaagaaggtttcaggtcaagttggtgaagaggagaagctgaaggcagtggcatgttactgggcaaattgttgatggcttccatccccgcagaaatgtcctttcgaattcgtttgctagtcggagaaaaattcccatcacaagcaccattctgctggtctccattaagtggtgatcgagctccttccaacttccttttcacagtctcttgtagcatgatcagcgtgtggttcctctgctccgccgaggcagcctccgcatcttgctggggtttgctcgggtgctgctgtttgccggtgccggcgcccgatttcttggccctctgctccaggtccgc

SEQ ID NO: 625 - DNA, 231 bp, Homo sapiens
  modified_base (78): a, t, c, g, other or unknown
  modified_base (88): a, t, c, g, other or unknown
  modified_base (138): a, t, c, g, other or unknown
  modified_base (146): a, t, c, g, other or unknown
  modified_base (151): a, t, c, g, other or unknown
  modified_base (162): a, t, c, g, other or unknown
  modified_base (166): a, t, c, g, other or unknown
  modified_base (169): a, t, c, g, other or unknown
  modified_base (171): a, t, c, g, other or unknown
  modified_base (195)..(197): a, t, c, g, other or unknown
  modified_base (206): a, t, c, g, other or unknown
  modified_base (216): a, t, c, g, other or unknown
  modified_base (226): a, t, c, g, other or unknown
agtagcgtgactacgtttaaaacggagcagccaggtgctccaagcccaggtttcatcttcctaaccaagaaaggccgncaagtctgtnctgaccccagtaaggagtggttccaggaaatacggtcagtaacctggganctgagtgncttangggtccagaancttngangnccaggcaacctgagttggcccagnnngggaggagnaggggcctgnaccttggggnacatg

SEQ ID NO: 626 - DNA, 239 bp, Homo sapiens
  modified_base (4): a, t, c, g, other or unknown
  modified_base (20): a, t, c, g, other or unknown
  modified_base (23): a, t, c, g, other or unknown
  modified_base (42): a, t, c, g, other or unknown
  modified_base (53): a, t, c, g, other or unknown
  modified_base (62): a, t, c, g, other or unknown
  modified_base (70): a, t, c, g, other or unknown
  modified_base (106): a, t, c, g, other or unknown
  modified_base (121): a, t, c, g, other or unknown
  modified_base (126): a, t, c, g, other or unknown
  modified_base (152): a, t, c, g, other or unknown
  modified_base (155): a, t, c, g, other or unknown
  modified_base (165): a, t, c, g, other or unknown
  modified_base (184): a, t, c, g, other or unknown
  modified_base (207): a, t, c, g, other or unknown
  modified_base (224): a, t, c, g, other or unknown
gganatggaaggcaatgacngcnacgagggctctgtgtgganatgttcaaggngctggcaanagatcctncgattcaactacaagatccgactggttggggatggngtgtacggcgttccngaggnacaacggcacctggaagggaatggtnggngagctgatcnctaggaaagcagtctggcngtggcaggcctcaccattacagntgaacgggagaaggtgnttgatttctctaagc

SEQ ID NO: 627 - DNA, 1481 bp, Homo sapiens
ggcaggagaatttgaaagggtgccccaaaggacaatctctaaaggggtaagggagatacctaccttgtctggtaggggagatgtttcgttttcatgctttaccagaaaatccacttccctgccgaccttagtttcaaagcttattcttaattagagacaagaaacctgtttcaacttgaagacaccgtatgaggtgaatggacagccagccaccacaatgaaagaaatcaaaccaggaataacctatgctgaacccacgcctcaatcgtccccaagtgtttcctgacacgcatctttgcttacagtgcatcacaactgaagaatggggttcaacttgacgcttgcaaaattaccaaataacgagctgcacggccaagagagtcacaattcaggcaacaggagcgacgggccaggaaagaacaccacccttcacaatgaatttgacacaattgtcttgccggtgctttatctcattatatttgtggcaagcatcttgctgaatggtttagcagtgtggatcttcttccacattaggaataaaaccagcttcatattctatctcaaaaacatagtggttgcagacctcataatgacgctgacatttccatttcgaatagtccatgatgcaggatttggaccttggtacttcaagtttattctctgcagatacacttcagttttgttttatgcaaacatgtatacttccatcgtgttccttgggctgataagcattgatcgctatctgaaggtggtcaagccatttggggactctcggatgtacagcataaccttcacgaaggttttatctgtttgtgtttgggtgatcatggctgttttgtctttgccaaacatcatcctgacaaatggtcagccaacagaggacaatatccatgactgctcaaaacttaaaagtcctttgggggtcaaatggcatacggcagtcacctatgtgaacagctgcttgtttgtggccgtgctggtgattctgatcggatgttacatagccatatccaggtacatccacaaatccagcaggcaattcataagtcagtcaagccgaaagcgaaaacataaccagagcatcagggttgttgtggctgtgttttttacctgctttctaccatatcacttgtgcagaattccttttacttttagtcacttagacaggcttttagatgaatctgcacaaaaaatcctatattactgcaaagaaattacacttttcttgtctgcgtgtaatgtttgcctggatccaataatttactttttcatgtgtaggtcattttcaagaaggctgttcaaaaaatcaaatatcagaaccaggagtgaaagcatcagatcactgcaaagtgtgagaagatcggaagttcgcatatattatgattacactgatgtgtaggccttttattgtttgttggaatcgatatgtacaaagtgtaaaaaaatgtttcttttcattaaaaaaaaaaaaaaaaaaaaag

SEQ ID NO: 628 - DNA, 2499 bp, Homo sapiens
gctgctgcgccgcgctcccggcgcactcggagcccggcggggaccgggaggcagagacggggcggccgtggctccgagggcgggagctgagccgggccccgggaccgaagtttggcggcggctccgggaggcagagcgggctccccgggcgacttccaggcccctctcgcgtcctcgccccggacccgtgggcagccgggggggacggaagccgcggccgggccaactccgaggcggggacgccgcgacgggaacttgaggtgggaactttgcgcgctgcagcctcgccgggcgccaccgaagcgcgaaccggaccccgagcctgcaaactcgggctcgggggcggctgcacgtggccgtggccctgaactccctgcgggggcctcgaaacccgcctgcggggaggccagggcgacagaggactcgggagtcaccgctggtgcgtggcggcgtggagcgcgcttgttacggccaagggagcaggctgcctaatgaaggagccaggcttgcacacagacaattctagaactggtggcccgagagggatgtgaaggcccaaaatgaccctcttaccgggagacaattctgactacgactacagcgcgctgagctgcacctcggacgcctccttccacccggccttcctcccgcagcgccaggccatcaagggcgcgttctaccgccgggcgcagcggctgcggccgcaggatgagccccgccagggctgtctgcccgtaggaccgccgccgtcggatcatcatcaacgtaggcggcatcaagtactcgctgccctggaccacgctggacgagttcccgctgacgcgcctgggccagctcaaggcctgcaccaacttcgacgacatcctcaacgtgtgcgatgactacgacgtcacctgcaacgagttcttcttcgaccgcaacccgggggccttcggcactatcctgaccttcctgcgcgcgggcaagctgcggctgctgcgcgagatgtgcgcgctgtccttccaggaggagctgctgtactggggcatcgcggaggaccacctggacggctgctgcaagcgccgctacctgcagaagattgaggagttcgcggagatggtggagcgggaggaagaggacgacgcgctggacagcgagggcccgcgacagcgagggcccggccgagggcgagggccgcctggggcgctgcatgcggcgactgcgcgaacatggtggagaggccgcactcggggctgcctggcaaaggtgttcgcctgcctgtcggtgctcttcgtgaccgtcaccgccagtcaacctctccgtcagcaccttgcccagcctgagggaggaggaggagcagggccactgttcccagatgtgccacaacgtcttcatcgtggagtcggtgtgcgtgggctggttctccctggagttcctcctgcggctcattcaggcgcccagcaagttcgccttcctgcggagcccgctgacgctgatcgacctggtggccatcctgccctactacatcacgctgctggtggacggcgccgccgcgggccgtcgcaagcccggcgcgggcaacagctacctggacaaggtggggctggtgctgcgcgtgctgcgggcgctgcgcatcctgtacgtgatgcgcctggcgcgccactccctggggctgcagacgctggggctcacggcccgccgctgcacccgcgagttcgggctcctgctgctcttcctctgcgtggccatcgccctcttcgcgccccctgctctacgtcatcgagaacgagatggccgacagccccgagttcaccagcatccctgcctgctactggtgggctgtcatcaccatgacgacggtgggctatggcgacatggtccccaggagcaccccgggccaggtagtggccctgagcagcatcctgagcggcatcctgctcatggccttcccagtcacctccatcttccacaccttctcccgctcctacctggagctcaagcaggagcaagagagggttgatgttccggagggcgcagttcctcatcaaaaccaagtcgcagctgagcgtgtcccaggacagtgacatcttgttcggaagtgccttcctcggacaccaagagacaataactgagcgcggaggacacgcctgccctgcctgccatctgtggcccgaagccatttgccatccactgcaaacgcctggagagggacaggccgcttccgagtgcagtcctggcgcagcaccgactgcccacgcacccggggaaggacaccctcactcccacacctccgggaagaacactagaacatcagcagaggggccctgcccctccgcctgcagccgtgaaaggaagctgggtcatcagcccagccccgcccaccccagcccctatgtgtgtttccctcaataaggagatgccttgttcttttcaccatgcgaataacatgcccagcaaaaaccgtgctttatgggtctgcctggagaaaaaaaaaaaaaataccaccagcagaaacagcac

SEQ ID NO: 629 - DNA, 1847 bp, Homo sapiens
cagcacatcgctgcattcggctggttttcagggtcttgttcccaatcagtttccagccaacaccagggtgtccctagtccgcagaggtgtgggggacacactccataatctctacttttctttttgtgcagctgagtcatggagctttcagccccagcacatggctcctccttaactgcgtctgctcaacctccctcagccctgtgaacagcatccccgcacacagacgcagagcaggactctctctgctgccacttcaccttcctgagagaggaccagcggccagagcctcagtgactgccaccctggaggacagggcacaacaaccgtttctggagagaatgggaggattccagaggggcaaatatggaactatggctgaaggtagatcagaagataacttgtctgcaacaccaccggcattgaggattatcctagtgggcaaaacaggctgcgggaaaagtgccacagggaacagcatccttggccagcccgtgtttgagtccaagctgagggcccagtcagtgaccaggacgtgccaggtgaaaacaggaacatggaacgggaggaaagtcctggtggttgacacgccctccatctttgagtcacaggccgatacccaagagctgtacaagaacatcggggactgctacctgctctctgccccggggccccacgtcctgcttctggtgatccagctggggcgtttcactgctcaggacacagtggccatcaggaaggtgaaagaggtctttgggacaggggccatgagacatgtggtcatcctcttcacccacaaagaggacttagggggccaggccctggatgactatgtagcaaacacggacaactgcagcctgaaagacctggtgcgggagtgtgagagaaggtactgtgccttcaacaactggggctctgtggaggagcagaggcagcagcaggcagagctcctggctgtgattgagaggctggggagggagcgagagggctccttccacagcaatgacctcttcttggatgcccagctgctccaaagaactggagctggggcctgccaggaagactacaggcagtaccaggccaaagtggaatggcaggtggagaagcacaagcaagagctgagggagaacgagagtaactgggcatacaaggcgctcctcagagtcaaacacttgatgcttttgcattatgagatttttgtttttctattgttgtgcagcatactttttttcattatttttctgttcatctttcattacatttaaatctctggaccctggagcacttctaatgtatcaccccatggagtcattgttctaataatcaccaattcagactcagatcctcgtggtctatggagcatgctgcttgctgtctgtgcagctcccatttccccttcttcctgatagacttggagctgtgtgcctccactccaaggctgcctgcctgctgtaaacactattccactctgtctgccaacaactgcttcaggaatgggcctgagatcccatgcaggtccctgagaagtgagtaaaagtccgcagaggtggggatggaagatctctccttagatagaacctgtcttcctccctggcattgtggggtctgggcgtgacactgggactctcagcagctttgtgctgccaacctgagattgaaggcagtgcctcagagcagcacagagagttggggccccctgagccctgagccaccagccctgcagcctgccctatctccgcatttccagttgtattagccaatagatttcctacttatttaagctatttgagctccgggtctcttctacctgcattctaaaacattcaaagtaataaaaatttctccac

SEQ ID NO: 630 - DNA, 7028 bp, Homo sapiens
ggaattttagctgcagtcttcttggtgccagcttatcaatcccaaactctgggtgtaaaagattctacagggcactttcttatgcaaggagctaaacagtgattaaaggagcaggatgaaaagatggcacagtcagtgctggtaccgccaggacctgacagcttccgcttctttaccagggaatcccttgctgctattgaacaacgcattgcagaagagaaagctaagagacccaaacaggaacgcaaggatgaggatgatgaaaatggcccaaagccaaacagtgacttggaagcaggaaaatctcttccatttatttatggagacattcctccagagatggtgtcagtgcccctggaggatctggacccctactatatcaataagaaaacgtttatagtattgaataaagggaaagcaatctctcgattcagtgccacccctgccctttacattttaactcccttcaaccctattagaaaattagctattaagattttggtacattctttattcaatatgctcattatgtgcacgattcttaccaactgtgtatttatgaccatgagtaaccctccagactggacaaagaatgtggagtatacctttacaggaatttatacttttgaatcacttattaaaatacttgcaaggggcttttgtttagaagatttcacatttttacgggatccatggaattggttggatttcacagtcattacttttgcatatgtgacagagtttgtggacctgggcaatgtctcagcgttgagaacattcagagttctccgagcattgaaaacaatttcagtcattccaggcctgaagaccattgtgggggccctgatccagtcagtgaagaagctttctgatgtcatgatcttgactgtgttctgtctaagcgtgtttgcgctaataggattgcagttgttcatgggcaacctacgaaataaatgtttgcaatggcctccagataattcttcctttgaaataaatatcacttccttctttaacaattcattggatgggaatggtactactttcaataggacagtgagcatatttaactgggatgaatatattgaggataaaagtcacttttattttttagaggggcaaaatgatgctctgctttgtggcaacagctcagatgcaggccagtgtcctgaaggatacatctgtgtgaaggctggtagaaaccccaactatggctacacgagctttgacacctttagttgggcctttttgtccttatttcgtctcatgactcaagacttctgggaaaacctttatcaactgacactacgtgctgctgggaaaacgtacatgatattttttgtgctggtcattttcttgggctcattctatctaataaatttgatcttggctgtggtggccatggcctatgaggaacagaatcaggccacattggaagaggctgaacagaaggaagctgaatttcagcagatgctcgaacagttgaaaaagcaacaagaagaagctcaggcggcagctgcagccgcatctgctgaatcaagagacttcagtggtgctggtgggataggagttttttcagagagttcttcagtagcatctaagttgagctccaaaagtgaaaaagagctgaaaaacagaagaaagaaaaagaaacagaaagaacagtctggagaagaagagaaaaatgacagagtccgaaaatcggaatctgaagacagcataagaagaaaaggtttccgtttttccttggaaggaagtaggctgacatatgaaaagagattttcttctccacaccagtccttactgagcatccgtggctcccttttctctccaagacgcaacagtagggcgagccttttcagcttcagaggtcgagcaaaggacattggctctgagaatgactttgctgatgatgagcacagcacctttgaggacaatgacagccgaagagactctctgttcgtgccgcacagacatggagaacggcgccacagcaatgtcagccaggccagccgtgcctccagggtgctccccatcctgcccatgaatgggaagatgcatagcgctgtggactgcaatggtgtggtctccctggtcgggggcccttctaccctcacatctgctgggcagctcctaccagagggcacaactactgaaacagaaataagaaagagacggtccagttcttatcatgtttccatggatttattggaagatcctacatcaaggcaaagagcaatgagtatagccagtattttgaccaacaccatggaagaacttgaagaatccagacagaaatgcccaccatgctggtataaatttgctaatatgtgtttgatttgggactgttgtaaaccatggttaaaggtgaaacaccttgtcaacctggttgtaatggacccatttgttgacctggccatcaccatctgcattgtcttaaatacactcttcatggctatggagcactatcccatgacggagcagttcagcagtgtactgtctgttggaaacctggtcttcacagggatcttcacagcagaaatgtttctcaagataattgccatggatccatattattactttcaagaaggctggaatatttttgatggttttattgtgagccttagtttaatggaacttggtttggcaaatgtggaaggattgtcagttctccgatcattccggctgctccgagttttcaagttggcaaaatcttggccaactctaaatatgctaattaagatcattggcaattctgtgggggctctaggaaacctcaccttggtattggccatcatcgtcttcatttttgctgtggtcggcatgcagctctttggtaagagctacaaagaatgtgtctgcaagatttccaatgattgtgaactcccacgctggcacatgcatgactttttccactccttcctgatcgtgttccgcgtgctgtgtggagagtggatagagaccatgtgggactgtatggaggtcgctggccaaaccatgtgccttactgtcttcatgatggtcatggtgattggaaatctagtggttctgaacctcttcttggccttgcttttgagttccttcagttctgacaatcttgctgccactgatgatgataacgaaatgaataatctccagattgctgtgggaaggatgcagaaaggaatcgattttgttaaaagaaaaatacgtgaatttattcagaaagcctttgttaggaagcagaaagctttagatgaaattaaaccgcttgaagatctaaataataaaaaagacagctgtatttccaaccataccaccatagaaataggcaaagacctcaattatctcaaagacggaaatggaactactagtggcataggcagcagtgtagaaaaatatgtcgtggatgaaagtgattacatgtcatttataaacaaccctagcctcactgtgacagtaccaattgctgttggagaatctgactttgaaaatttaaatactgaagaattcagcagcgagtcagatatggaggaaagcaaagagaagctaaatgcaactagttcatctgaaggcagcacggttgatattggagctcccgccgagggagaacagcctgaggttgaacctgaggaatcccttgaacctgaagcctgttttacagaagactgtgtacggaagttcaagtgttgtcagataagcatagaagaaggcaaagggaaactctggtggaatttgaggaaaacatgctataagatagtggagcacaattggttcgaaaccttcattgtcttcatgattctgctgagcagtggggctctggcctttgaagatatatacattgagcagcgaaaaaccattaagaccatgttagaatatgctgacaaggttttcacttacatattcattctggaaatgctgctaaagtgggttgcatatggttttcaagtgtattttaccaatgcctggtgctggctagacttcctgattgttgatgtctcactggttagcttaactgcaaatgccttgggttactcagaacttggtgccatcaaatccctcagaacactaagagctctgaggccactgagagctttgtcccggtttgaaggaatgagggctgttgtaaatgctcttttaggagccattccatctatcatgaatgtacttctggtttgtctgatcttttggctaatattcagtatcatgggagtgaatctctttgctggcaagttttaccattgtattaattacaccactggagagatgtttgatgtaagcgtggtcaacaactacagtgagtgcaaagctctcattgagagcaatcaaactgccaggtggaaaaatgtgaaagtaaactttgataacgtaggacttggatatctgtctctacttcaagtagccacgtttaagggatggatggatattatgtatgcagctgttgattcacgaaatgtagaattacaacccaagtatgaagacaacctgtacatgtatctttattttgtcatctttattatttttggttcattctttaccttgaatcttttcattggtgtcatcatagataacttcaaccaacagaaaaagaagtttggaggtcaagacatttttatgacagaagaacagaagaaatactacaatgcaatgaaaaaactgggttcaaagaaaccacaaaaacccatacctcgacctgctaacaaattccaaggaatggtctttgattttgtaaccaaacaagtctttgatatcagcatcatgatcctcatctgccttaacatggtcaccatgatggtggaaaccgatgaccagagtcaagaaatgacaaacattctgtactggattaatctggtgtttattgttctgttcactggagaatgtgtgctgaaactgatctctcttcgttactactatttcactattggatggaatatttttgattttgtggtggtcattctctccattgtaggaatgtttctggctgaactgatagaaaagtattttgtgtcccctaccctgttccgagtgatccgtcttgccaggattggccgaatcctacgtctgatcaaaggagcaaaggggatccgcacgctgctctttgctttgatgatgtcccttcctgcgttgtttaacatcggcctccttcttttcctggtcatgttcatctacgccatctttgggatgtccaattttgcctatgttaagagggaagttgggatcgatgacatgttcaactttgagacctttggcaacagcatgatctgcctgttccaaattacaacctctgctggctgggatggattgctagcacctattcttaatagtggacctccagactgtgaccctgacaaagatcaccctggaagctcagttaaaggagactgtgggaacccatctgttgggattttcttttttgtcagttacatcatcatatccttcctggttgtggtgaacatgtacatcgcggtcatcctggagaacttcagtgttgctactgaagaaagtgcagagcctctgagtgaggatgactttgagatgttctatgaggtttgggagaagtttgatcccgatgcgacccagtttatagagtttgccaaactttctgattttgcagatgccctggatcctcctcttctcatagcaaaacccaacaaagtccagctcattgccatggatctgcccatggtgagtggtgaccggatccactgtcttgacatcttatttgcttttacaaagcgtgttttgggtgagagtggagagatggatgcccttcgaatacagatggaagagcgattcatggcatcaaacccctccaaagtctcttatgagcccattacgaccacgttgaaacgcaaacaagaggaggtgtctgctattattatccagagggcttacagacgctacctcttgaagcaaaaagttaaaaaggtatcaagtatatacaagaaagacaaaggcaaagaatgtgatggaacacccatcaaagaagatactctcattgataaactgaatgagaattcaactccagagaaaaccgatatgacgccttccaccacgtctccaccctcgtatgatagtgtgaccaaaccagaaaaagaaaaatttgaaaaagacaaatcagaaaaggaagacaaagggaaagatatcagggaaagtaaaaagtaaaaagaaaccaagaattttccattttgtgatcaattgtttacagcccgtgatggtgatgtgtttgtgtcaacaggactcccacaggaggtctatgccaaactgactgtttttacaaatgtatacttaaggtcagtgcctataacaagacagagacctctggtcagcaaactggaactcagtaaactggagaaatagtatcgatgggaggtttctattttcacaaccagctgacactgctgaagagcagaggcgtaatggctactcagacgataggaaccaatttaaaggggggagggaagttaaatttttatgtaaattcaacatgtgacacttgataatagtaattgtcaccagtgtttatgttttaactgccacacctgccatatttttacaaaacgtgtgctgtgaatttatcacttttctttttaattcacaggttgtttactattatatgtgactatttttgtaaatgggtttgtgtttggggagagggattaaagggagggaattctacatttctctattgtattgtataactggatatattttaaatggaggcatgctgcaattctcattcacacataaaaaaatcacatcacaaaagggaagagtttacttcttgtttcaggatgtttttagatttttgaggtgcttaaatagctattcgtatttttaaggtgtctcatccagaaaaaatttaatgtgcctgtaaatgttccatagaatcacaagcattaaagagttgttttatttttacataacccattaaatgtacatgtatatatgtatatatgtaaaaggggcgggaaaatacatatatatgtatacacacatgcacacacagagatatacacataccattacattgtcattcacatcccaggcgc

SEQ ID NO: 631 - DNA, 262 bp, Homo sapiens
  modified_base (57): a, t, c, g, other or unknown
  modified_base (67): a, t, c, g, other or unknown
  modified_base (103): a, t, c, g, other or unknown
  modified_base (154): a, t, c, g, other or unknown
  modified_base (165): a, t, c, g, other or unknown
  modified_base (184): a, t, c, g, other or unknown
  modified_base (217): a, t, c, g, other or unknown
  modified_base (233): a, t, c, g, other or unknown
  modified_base (243): a, t, c, g, other or unknown
atgttggccaacctattggtcatggtggcaatctatgtcaaccgccgcttccatttncctatttatnacctaatggctaatctggctgctgcagacttctttnctgggttggcctacttctatctcatgttcaacacaggacccaatactcggngactgactgtnagcacatggctccttcgtnagggcctcattgacaccagcctgagggcatctntggccaacttactggntattgcaatngagaggcacattacggttt

SEQ ID NO: 632 - DNA, 3525 bp, Homo sapiens
  modified_base (3520): a, t, c, g, other or unknown
ccggccttggaacaactgtggaacctgaggccgcttgccctcccgccccatggagcggcccccggggctgcggccgggcgcgggcgggccctgggagatgcgggagcggctgggcaccggcggcttcgggaacgtctgtctgtaccagcatcgggaacttgatctcaaaatagcaattaagtcttgtcgcctagagctaagtaccaaaaacagagaacgatggtgccatgaaatccagattatgaagaagttgaaccatgccaatgttgtaaaggcctgtgatgttcctgaagaattgaatattttgattcatgatgtgcctcttctagcaatggaatactgttctggaggagatctccgaaagctgctcaacaaaccagaaaattgttgtggacttaaagaaagccagatactttctttactaagtgatatagggtctgggattcgatatttgcatgaaaacaaaattatacatcgagatctaaaacctgaaaacatagttcttcaggatgttggtggaaagataatacataaaataattgatctgggatatgccaaagatgttgatcaaggaagtctgtgtacatcttttgtgggaacactgcagtatctggccccagagctctttgagaataagccttacacagccactgttgattattggagctttgggaccatggtatttgaatgtattgctggatataggccttttttgcatcatctgcagccatttacctggcatgagaagattaagaagaaggatccaaagtgtatatttgcatgtgaagagatgtcaggagaagttcggtttagtagccatttacctcaaccaaatagcctttgtagtttaatagtagaacccatggaaaactggctacagttgatgttgaattgggaccctcagcagagaggaggacctgttgaccttactttgaagcagccaagatgttttgtattaatggatcacattttgaatttgaagatagtacacatcctaaatatgacttctgcaaagataatttcttttctgttaccacctgatgaaagtcttcattcactacagtctcgtattgagcgtgaaactggaataaatactggttctcaagaacttctttcagagacaggaatttctctggatcctcggaaaccagcctctcaatgtgttctagatggagttagaggctgtgatagctatatggtttatttgtttgataaaagtaaaactgtatatgaagggccatttgcttccagaagtttatctgattgtgtaaattatattgtacaggacagcaaaatacagcttccaattatacagctgcgtaaagtgtgggctgaagcagtgcactatgtgtctggactaaaagaagactatagcaggctctttcagggacaaagggcagcaatgttaagtcttcttagatataatgctaacttaacaaaaatgaagaacactttgatctcagcatcacaacaactgaaagctaaattggagttttttcacaaaagcattcagcttgacttggagagatacagcgagcagatgacgtatgggatatcttcagaaaaaatgctaaaagcatggaaagaaatggaagaaaaggccatccactatgctgaggttggtgtcattggatacctggaggatcagattatgtctttgcatgctgaaatcatggagctacagaagagcccctatggaagacgtcagggagacttgatggaatctctggaacagcgtgccattgatctatataagcagttaaaacacagaccttcagatcactcctacagtgacagcacagagatggtgaaaatcattgtgcacactgtgcagagtcaggaccgtgtgctcaaggagctgtttggtcatttgagcaagttgttgggctgtaagcagaagattattgatctactccctaaggtggaagtggccctcagtaatatcaaagaagctgacaatactgtcatgttcatgcagggaaaaaggcagaaagaaatatggcatctccttaaaattgcctgtacacagagttctgcccggtcccttgtaggatccagtctagaaggtgcagtaacccctcagacatcagcatggctgcccccgacttcagcagaacatgatcattctctgtcatgtgtggtaactcctcaagatggggagacttcagcacaaatgatagaagaaaatttgaactgccttggccatttaagcactattattcatgaggcaaatgaggaacagggcaatagtatgatgaatcttgattggagttggttaacagaatgagttgtcacttgttcactgtccccaaacctatggaagttgttgctatacatgttggaaatgtgtttttcccccatgaaaccattcttcagacatcagtcaatggaagaaatggctatgaacagaaactacatttctactatgatcagaagaacatgattttacaagtataacagttttgagtaattcaagcctctaaacagacaggaatttagaaaaagtcaatgtacttgtttgaatatttgttttaataccacagctatttagaagcatcatcacgacacatttgccttcagtcttggtaaaacattacttatttaactgattaaaaataccttctatgtattagtgtcaacttttaacttttgggcgtaagaccaaatgtagttttgtatacagagaagaaaacctcaagtaataggcattttaagtaaaagtctacctgtgtttttttctaaaaaggctgctcacaagttctatttcttgaagaataaattctacctccttgtgttgcactgaacaggttctcttcctggcatcataaggagttggtgtaatcattttaaattccactgaaaatttaacagtatccccttctcatcgaagggattgtgtatctgtgcttctaatattagttggctttcataaatcatgttgttgtgtgtatatgtatttaagatgtacatttaataatatcaaagagaagatgcctgttaatttataatgtatttgaaaattacatgttttttcatttgtaaaaatgagtcatttgtttaaacaatctttcatgtcttgtcatacaaatttataaaggtctgcactcctttatctgtaattgtaattccaaaatccaaaaagctctgaaaacaaggtttccataagcttggtgacaaaattcatttgcttgcaatctaatctgaactgaccttgaatctttttatcccatttagtgtgaatattcctttattttgctgcttgatgatgagagggagggctgctgccacagactgtggtgagggctggttaatgtagtatggtatatgcacaaaactacttttctaaaatctaaaatttcataattctgaaacaacttgccccaagggtttcagagaaaggactgtggacctctatcatctgctaagtaatttagaagatattatttgtcttaaaaaatgtgaaatgcttttatattctaatagtttttcactttgtgtattaaatggtttttaaattaanaaaaa

SEQ ID NO: 633 - DNA, 1481 bp, Homo sapiens; identical to SEQ ID NO: 627

SEQ ID NO: 634 - DNA, 2165 bp, Homo sapiens
caggttacaagacacataatcattccagtttggcgaggtcacttgtagggctgttttaatcaagctgcccaaagtcccccaatcactcctggaatacacagagagaggcagcagcttgctcagcggacaaggatgctgggcgtgagggaccaaggcctgccctgcactcgggcctcctccagccagtgctgaccagggacttctgacctgctggccagccaggacctgtgtggggaggccctcctgctgccttggggtgacaatctcagctccaggctacagggagaccgggaggatcacagagccagcatggatcctgacagtgatcaacctctgaacagcctcgatgtcaaacccctgcgcaaaccccgtatccccatggagaccttcagaaaggtggggatccccatcatcatagcactactgagcctggcgagtatcatcattgtggttgtcctcatcaaggtgattctggataaatactacttcctctgcgggcagcctctccacttcatcccgaggaagcagctgtgtgacggagagctggactgtcccttgggggaggacgaggagcactgtgtcaagagcttccccgaagggcctgcagtggcagtccgcctctccaaggaccgatccacactgcaggtgctggactcggccacagggaactggttctctgcctgtttcgacaacttcacagaagctctcgctgagacagcctgtaggcagatgggctacagcagcaaacccactttcagagctgtggagattggcccagaccaggatctggatgttgttgaaatcacagaaaacagccaggaggcttcgcatgcggaactcaagtgggccctgtctctcaggctccctggtctccctgcactgtcttgcctgtgggaagagcctgaagaccccccgtgtggtgggtggggaggaggcctctgtggattcttggccttggcaggtcagcatccagtacgacaaacagcacgtctgtggagggagcatcctggacccccactgggtcctcacggcagcccactgcttcaggaaacataccgatgtgttcaactggaaggtgcgggcaggctcagacaaactgggcagcttcccatccctggctgtggccaagatcatcatcattgaattcaaccccatgtaccccaaagacaatgacatcgccctcatgaagctgcagttcccactcactttctcaggcacagtcaggcccatctgtctgcccttctttgatgaggagctcactccagccaccccactctggatcattggatggggctttacgaagcagaatggagggaagatgtctgacatactgctgcaggcgtcagtccaggtcattgacagcacacggtgcaatgcagacgatgcgtaccagggggaagtcaccgagaagatgatgtgtgcaggcatcccggaagggggtgtggacacctgccagggtgacagtggtgggcccctgatgtaccaatctgaccagtggcatgtggtgggcatcgttagctggggctatggctgcgggggcccgagcaccccaggagtatacaccaaggtctcagcctatctcaactggatctacaatgtctggaaggctgagctgtaatgctgctgcccctttgcagtgctgggagccgcttccttcctgccctgcccacctggggatcccccaaagtcagacacagagcaagagtccccttgggtacacccctctgcccacagcctcagcatttcttggagcagcaaagggcctcaattcctataagagaccctcgcagcccagaggcgcccagaggaagtcagcagccctagctcggccacacttggtgctcccagcatcccagggagagacacagcccactgaacaaggtctcaggggtattgctaagccaagaaggaactttcccacactactgaatggaagcaggctgtcttgtaaaagcccagatcactgtgggctggagaggagaaggaaagggtctgcgccagccctgtccgtcttcacccatccccaagcctactagagcaagaaaccagttgtaatataaaatgcactgccctactgttggtatgactaccgttacctactgttgtcattgttattacagctatggccactattattaaagagctgtgtaacatctctggcaaaa

SEQ ID NO: 635 - DNA, 2286 bp, Homo sapiens
ggcacgagccaaggctcccagaaatctcaggtcagaggcacggacagcctctggagctctcgtctggtgggaccatgaactgccagcagctgtggctgggcttcctactccccatgacagtctcaggccgggtcctggggcttgcagaggtggcgcccgtggactacctgtcacaatatgggtacctacagaagcctctagaaggatctaataacttcaagccagaagatatcaccgaggctctgagtctcaggtcagctggatgatgccacaagggcccgcatgaggcagcctcgttgtggcctagaggatcccttcaaccagaagacccttaaatacctgttgctgggccgctggagaaagaagcacctgactttccgcatcttgaacctgccctccacccttccaccccacacagcccgggcagccctgcgtcaagccttccaggactggagcaatgtggctcccttgaccttccaagaggtgcaggctggtgcggctgacatccgcctctccttccatggccgccaaagctcgtactgttccaatacttttgatgggcctgggagagtcctggcccatgccgacatcccagagctgggcagtgtgcacttcgacgaagacgagttctggactgaggggacctaccgtggggtgaacctgcgcatcattgcagcccatgaagtgggccatgctctggggcttgggcactcccgatattcccaggccctcatggccccagtctacgagggctaccggccccactttaagctgcacccagatgatgtggcagggatccaggctctctatggcaagaagagtccagtgataagggatgaggaagaagaagagacagagctgcccactgtgcccccagtgcccacagaacccagtcccatgccagacccttgcagtagtgaactggatgccatgatgctgggtgaggcccctcccctccaggctgttggcaggcggtgggggcagcctgctgatcctgaggcctggacaaatgggagtgacatgggacttcagcatgagcaatggagggccccgtgggaagacctatgctttcaagggggactatgtgtggactgtatcagattcaggaccgggccccttgttccgagtgtctgccctttgggaggggctccccggaaacctggatgctgctgtctactcgcctcgaacacaatggattcacttctttaagggagacaaggtgtggcgctacattaatttcaagatgtctcctggcttccccaagaagctgaatagggtagaacctaacctggatgcagctctctattggcctctcaaccaaaaggtgttcctctttaagggctccgggtactggcagtgggacgagctagcccgaactgacttcagcagctaccccaaaccaatcaagggtttgtttacgggagtgccaaaccagccctcggctgctatgagttggcaagatggccgagtctacttcttcaagggcaaagtctactggcgcctcaaccagcagcttcgagtagagaaaggctatcccagaaatatttcccacaactggatgcactgtcgtccccggactatagacactaccccatcaggtgggaataccactccctcaggtacgggcataaccttggataccactctctcagccacagaaaccacgtttgaatactgactgctcacccacagacacaatcttggacattaacccctgaggctccaccacccaccctttcatttcccccccagaagcctaaggcctaatagctgaatgaaatacctgtctgctcagtagaaccttgcaggtgctgtagcaggcgcaagaccgtagatctcaggcctctaacacttccaactccagccaccactttcctgtgcattttcactcctgagaagtgctcccctaactcagatcccctaacttagatttggcccccaactccatttcctgtctgtcttagacagcccttccaactgtgtcatctcttctctggaggtcaatggtggagggagatgcctgggtcctgttcttcctacataaaatgcaagaaaacagcatggccagtaaactgagcaagggccttggaatccttgagaatcacatttatgtgcttatgattacgggcaagctaattaaccttgttgaatctcagattccccatttgcaacattaggttaagaccagtactgcaggattgttgcactaaatgaaatactgtatgtgaagtgcctggcacagtgtctggtacatttgtgtttaataaaagctaactccatgttcat

SEQ ID NO: 636 - DNA, 1989 bp, Homo sapiens
  modified_base (1912): a, t, c, g, other or unknown
  modified_base (1928): a, t, c, g, other or unknown
tgggaagaggatctgtccaggggttagaccttcaagggtgacttggagttctttacggcacccatgctttcttgaggagttttgtgtttgtgggtgtggggtcggggctcacctcctcccacatcctgcccagaggtgggcagagtgggggcagtgccttgctccccctgctcgctctctgctgactccggctccctgtgctgccccaggaccatgaatggcacctacaacacctgtggctccagcgacctcacctggcccccagcgatcaagctgggcttctacgcctacttgggcgtcctgctggtgctaggcctgctgctcaacagcctggcgctctgggtgttctgctgccgcatgcagcagtggacggagacccgcatctacatgaccaacctggcggtggccgacctctgcctgctgtgcaccttgcccttcgtgctgcactccctgcgagacagcctcagacacgccgctgtgccagctctcccagggcatctacctgaccaacaggtacatgagcatcagcctggtcacggccatcgccgtggaccgctatgtggccgtgcggcacccgctgcgtgcccgcgggctggcggtcccccaggcaggctgcggccgtgtgcgcggtcctctgggtgctggtcatcggctccctggtggctcgctggctcctggggattcaggagggcggcttctgcttcaggagcacccggcacaatttcaactccatggcgttcccgctgctgggattctacctgcccctggccgtggtggtcttctgctccctgaaggtggtgactgccctggcccagaggccacccaccgacgtggggcaggcagaggccacccgcaaggctgcccgcatggtctgggccaacctcctggtgttcgtggtctgcttcctgcccctgcacgtggggctgacagtgcgcctcgcagtgggctggaacgcctgtgccctcctggagacgatccgtcgcgccctgtacataaccagcaagctctcagatgccaactgctgcctggacgccatctgctactactacatggccaaggagttccaggaggcgtctgcactggccgtggctccccgtgctaaggcccacaaaagccaggactctctgtgcgtgaccctcgcctaagaggcgtgctgtgggcgctgtgggccaggtctcgggggctccgggaggtgctgcctgccaggggaagctggaaccagtagcaaggagcccgggatcagccctgaactcactgtgtattctcttggagccttgggtgggcagggacggcccaggtacctgctctcttgggaagagagagggacagggacaagggcaagaggactgaggccagagcaaggccaatgtcagagacccccgggatggggcctcacacttgccacccccagaaccagctcacctggccagagtgggttcctgctggccagggtgcagccttgatgacacctgccgctgcccctcggggctggaataaaactccccacccagagtcagtcctagtggggccctctgtgtttcgcactcgtgtggtgggaggcagggagggagcgcgtggctcggagggctggcggacatcttccagggacccttcggggctcttcactttgaggtcccccttggaccctttcaccccttcccacccccacccacctggagcgtgagcaggggctgttggaagctcctggcaggaccacagtagaggcccccagcccaggtttccttgctcaagacagggctgggagcagctgatctccatgtaggggctgcaacagcggtgcaagggggggtgaaccaaggtcaagcaggtgagggtgggttggggtgggtggcagtgaagggggtggccagggtctgtcaaggaacccagccctcttctccttccttcaggnacaggctggaaccatntctaggcaggggcaggggttgggtgcccactcaggtaaaggcacgatgtcctgctggtttc

SEQ ID NO: 637 - DNA, 660 bp, Homo sapiens
ctggcagcaatggggcctggagcttcaggggacggggtcaggactgagacagctccacacatagcactggactccagagttggtctgcacgcctacgacatcagcgtggtggtcatctactttgtcttcgtcattgctgtggggatctggtcgtccatccgtgcaagtcgagggaccattggcggctatttcctggccgggaggtccatgagctggtggccaattggagcatctctgatgtccagcaatgtgggcagtggcttgttcatcggcctggctgggacaggggctgccggaggccttgccgtaggtggcttcgagtggaacgcaacctggctgctcctggcccttggctgggtcttcgtccctgtgtacatcgcagcaggtgtggtcacaatgccgcagtatctgaagaagcgatttgggggccagaggatccaggtgtacatgtctgtcctgtctctcatcctctacatcttcaccaagatctcggtaggtgtcactgcaatgtggtcactgtgtctggaaatgctaattagggaactgctgagtgcatcaccatgtgcgtgttgctgaggggaagctgacaatcactgttgaaaaaaaggaaagcaggacctataaacatttaatgcatgttctgcctcagcactggggtac

SEQ ID NO: 638 - DNA, 2568 bp, Homo sapiens
gaattccgggggttccggcgctccgcggccccaagcgccctcctttcctccctccgccggccggggttgcgggcgcggggcgccgcgggccatgcgatctcggcgcggcccagcccggccggcggcgccccgcccccgctggagccctgggggccccgctgcggccgaggccatgttcccggtgtttccttgcacgctgctggccccccccttccccgtgctgggcctggactcccggggggtgggcggcctcatgaactccttcccgccacctcagggtcacgcccagaaccccctgcaggtcggggctgagctccagtcccgcttctttgcctcccagggctgcgcccagagtccattccaggccgcgccggcgcccccgcccacgccccaggccccggcggccgagcccctccaggtggacttgctcccggtgctcgccgccgcccaggagtccgccgcggctgctgcggcctgctgccgccgctgctgccgccgtcgctgccgcgcccccggcccctgccgccgcctctacggtggacacagcggccctgaagcagcctccggcgccccctccgccacccccgccagtgtcggcgcccgcggccgaggccgcgccccccgcctccgccgccactatcgccgcggcggcggccaccgccgtcgtagccccaacctcgacggtcgccgtggccccggtcgcgtctgccttggagaagaagacaaagagcaaggggccctacatctgcgctctgtgcgccaaggagttcaagaacggctacaatctccggaggcacgaagccatccacacgggagccaaggccggccgggtcccctcgggtgctatgaagatgccgaccatggtgcccctgagcctcctgagcgtgccccagctgagcggagccggcgggggagggggagaggcgggtgccggcggcggcgctgccgcagtggccgccggtggcgtggtgaccacgaccgcctcgggggaagcgcatccggaagaaccatgcctgcgagatgtgtggcaaggccttccgcgacgtctaccacctgaaccgacacaagctgtcgcactcggacgagaagccctaccagtgcccggtgtgccagcagcgcttcaagcgcaaggaccgcatgagctaccacgtgcgctcacatgacggcgctgtgcacaagccctacaactgctcccactgtggcaagagcttctcccggccggatcacctcaacagtcacgtcagacaagtgcactcaacagaacggcccttcaaatgtgagaaatgtgaggcagctttcgccacgaaggatcggctgcgggcgcacacagtacgacacgaggagaaagtgccatgtcacgtgtgtggcaagatgctgagctcggcttatatttcggaccacatgaaggtgcacagccagggtcctcaccatgtctgtgagctctgcaacaaaggtactggtgaggtttgtccaatggcggcggcagcggcggcggcagcggcagcggcggcagcggcagcagcggcagcagtagcagcccctcccacagctgtgggctccctctcgggggcggagggggtgcctgtgagctctcagccacttccctcccaaccctggtgagctccaagttggttgcgggggagaggggagaatggagtagagtcccttggtacaagctcctctcccccctcttttcccaccaactcctatttccctaccaaccaaggagcctccagaaggaaaggaggaagaaatgttttcttaggggaattcgctaggttttaacgatttgtttctcctgctcctcttctatcagacctgaccccacacaaacctgtcccctcggttgtgttgaagtcccctggacagtgggcaggggtggcagaggacacgagcagccactgcccgtaccccctctcctctctgtaagcccatgccctgtcttcccagggacttgtgagcctcttccctcgacggtcctcttctctccttccagtcctctccccctgctgtctgcagcccctccccggggagttggtgctttcttttcctttttttttttcccagggggagggaggagaggaaggagggggatcagagctgtcccaaagagggaaagcggtgaggtttgaggaggggcagaagcagggccggcaaaggttgtaccttcataaggtggtatggggggttggggtcaggccctgaacatcgtcctacttgagaatctgtcaggggaaaaagtcaaggggagcaggaggaagagccaggagggccagaggcagagaagagatggagtcttaggggccagggtgagcgaggggtccagggcctagaggtgcttcctgggggcgggggaatgcagccagtgtccccctcccctcttccaccccagctccagccctggtcttgtcttttcatccctcttccccacgacagaagaagttgtggccctggccatgtcatcgtgttcctgtgtcccctgcatgtaccccaccctccaccccttccttttgcgcggaccccattacaataaattttaaataaaatcctgtttctggctctggaaaa

SEQ ID NO: 639 - DNA, 2883 bp, Homo sapiens
gcgcctcccacgccggccgccgccgacgtgatcgctcgggcgcgccgggcgtggttgggggaaggggttgtgccgcgcgacggtctgcgtgctgtgcccactcaaaaggttccgggcgcgcaggagggaagaggcagtgctcgccactcccactgagattgagagacgcggcaaggaggcagcctgtggaggaactgggtaggatttaggaacgcaccgtgcacatgcttggtggtcttgttaagtggaaactgctgctttagagtttgtttggaaggtccgggtgactcatcccaacatttacatccttaattgttaaagcgctgcctccgagcgcacgcatcctgagatcctgagcctttggttaagaccgagctctattaagctgaaaagataaaaactctccagatgtcttccagtaatgtcgaagtttttatcccagtgtcacaaggaaacaccaatggcttccccgcgacagcttccaatgacctgaaggcatttactgaaggagctgtgttaagttttcataacatctgctatcgagtaaaactgaagagtggctttctaccttgtcgaaaaccagttgagaaagaaatattatcgaatatcaatgggatcatgaaacctggtctcaacgccatcctgggacccacaggtggaggcaaatcttcgttattagatgtcttagctgcaaggaaagatccaagtggattatctggagatgttctgataaatggagcaccgcgacctgccaatttcaaatgtaattcaggttacgtggtacaagatgatgttgtgatgggcactctgacggtgagagaaaacttacagttctcagcagctcttcggcttgcaacaactatgacgaatcatgaaaaaaacgaacggattaacagggtcattcaagagttaggtctggataaagtggcagactccaaggttggaactcagtttatccgtggtgtgtctggaggagaaagaaaaaggactagtataggaatggagcttatcactgatccttccatcttgttcttggatgagcctacaactggcttagactcaagcacagcaaatgctgtccttttgctcctgaaaaggatgtctaagcagggacgaacaatcatcttctccattcatcagcctcgatattccatcttcaagttgtttgatagcctcaccttattggcctcaggaagacttatgttccacgggcctgctcaggaggccttgggatactttgaatcagctggttatcactgtgaggcctataataaccctgcagacttcttcttggacatcattaatggagattccactgctgtggcattaaacagagaagaagactttaaagccacagagatcatagagccttccaagcaggataagccactcatagaaaaattagcggagatttatgtcaactcctccttctacaaagagacaaaagctgaattacatcaactttccgggggtgagaagaagaagaagatcacagtcttcaaggagatcagctacaccacctccttctgtcatcaactcagatgggtttccaagcgttcattcaaaaacttgctgggtaatccccaggcctctatagctcagatcattgtcacagtcgtactgggactggttataggtgccatttactttgggctaaaaaatgattctactggaatccagaacagagctggggttctcttcttcctgacgaccaaccagtgtttcagcagtgtttcagccgtggaactctttgtggtagagaagaagctcttcatacatgaatacatcagcggatactacagagtgtcatcttatttccttggaaaactgttatctgatttattacccatgaggatgttaccaagtattatatttacctgtatagtgtacttcatgttaggattgaagccaaaggcagatgccttcttcgttatgatgtttacccttatgatggtggcttattcagccagttccatggcactggccatagcagcaggtcagagtgtggtttctgtagcaacacttctcatgaccatctgttttgtgtttatgatgattttttcaggtctgttggtcaatctcacaaccattgcatcttggctgtcatggcttcagtacttcagcattccacgatatggatttacggctttgcagcataatgaatttttgggacaaaacttctgcccaggactcaatgcaacaggaaacaatccttgtaactatgcaacatgtactggcgaagaatatttggtaaagcagggcatcgatctctcaccctggggcttgtggaagaatcacgtggccttggcttgtatgattgttattttcctcacaattgcctacctgaaattgttatttcttaaaaaatattcttaaatttccccttaattcagtatgatttatcctcacataaaaaagaagcactttgattgaagtattcaatcaagtttttttgttgttttctgttcccttgccatcacactgttgcacagcagcaattgttttaaagagatacatttttagaaatcacaacaaactgaattaaacatgaaagaacccaagacatcatgtatcgcatattagttaatctcctcagacagtaaccatggggaagaaatctggtctaatttattaatctaaaaaaggagaattgaattctggaaactcctgacaagttattactgtctctggcatttgtttcctcatctttaaaatgaataggtaggttagtagcccttcagtcttaatactttatgatgctatggtttgccattatttaataaatgacaaatgtattaatgctatactggaaatgtaaaattgaaaatatgttggaaaaaagattctgtcttatagggtaaaaaaagccaccgtgatagaaaa

SEQ ID NO: 640 - DNA, 911 bp, Homo sapiens
ctcccacttcccactgtggcctgggtgggctcaggggctgcccttgacctggcctagagccctcccccagctggtggtggagctggcactctctgggagggagggggctgggagggaatgagtgggaatggcaagaggccagggtttggtgggatcaggttgaggcaggtttggtttccttaaaatgccaagttgggggccagtggggcccacatataaatcctcaccctgggagcctggctgccttgctctccttcctgggtctgtctctgccacctggtctgccacagatccatgatgtgcagttctctggagcaggcgctgggctgtgctggtcactaccttccacaagtactcctgccaagagggcgacaagttcaagctgagtaagggggaaatgaaggaacttctgcacaaggagctgcccagctttgtgggggagaaagtggatgaggaggggctgaagaagctgatgggcagcctggatgagaacagtgaccagcaggtggacttccaggagtatgctgttttcctggcactcatcactgtcatgtgcaatgacttcttccagggctgcccagaccgaccctgaagcagaactcttgacttcctgccatggatctcttgggcccaggactgttgatgcctttgagttttgtattcaataaactttttttgtctgttgataatattttaattgctcagtgatgttccataacccggctggctcagctggagtgctgggagatgagggcctcctggatcctgctcccttctgggctctgactctcctggaaatctctccaaggccagagctatgctttaggtctcaattttggaatttcaaacaccagcaaaaaattggaaatcgagataggttgctgacttttattttgtcaaataaagatatt

SEQ ID NO: 641 - DNA, 4701 bp, Homo sapiens
cagggctggcttttttttttttaataagatagctggtgcccaagattgttttccaccttaaggataaaacctgttaagaaagcctgaacaattacaaaaaaggaagaaaaggagacttggccaactggtgtcaggagtcttaacaaggtcatagtttgccagcccctgccctaaacaaataattcttgaatgcctactgtggtgtgtaagatatgagtaaataccagggatacacagagaacaaaagagaaaaactgctattcttgtgaaacttggaagttggaggagacttggaagatgcagaactggatgactactcattctcatgctatagccagttggaagtgaatggatcgcagcactcactgacctgtgcttttgaggacccagatgtcaacaccaccaatctggaatttgaaatatgtggggccctcgtggaggtaaagtgcctgaatttcaggaaactacaagagatatatttcatcgagacaaagaaattcttactgattggaaagagcaatatatgtgtgaaggttggagaaaagagtctaacctgcaaaaaaatagacctaaccactatagttaaacctgaggctccttttgacctgagtgtcatctatcgggaaggagccaatgactttgtggtgacatttaatacatcacacttgcaaaagaagtatgtaaaagttttaatgcatgatgtagcttaccgccaggaaaaggatgaaaacaaatggacgcatgtgaatttatccagcacaaagctgacactcctgcagagaaagctccaaccggcagcaatgtatgagattaaagttcgatccatccctgatcactattttaaaggcttctggagtgaatggagtccaagttattacttcagaactccagagatcaataatagctcaggggagatggatcctatcttactaaccatcagcattttgagttttttctctgtcgctctgttggtcatcttggcctgtgtgttatggaaaaaaaggattaagcctatcgtatggcccagtctccccgatcataagaagactctggaacatctttgtaagaaaccaagaaaaaatttaaatgtgagtttcaatcctgaaagtttcctggactgccagattcatagggtggatgacattcaagctagagatgaagtggaaggttttctgcaagatacgtttcctcagcaactagaagaatctgagaagcagaggcttggaggggatgtgcagagccccaactgcccatctgaggatgtagtcatcactccagaaagctttggaagagattcatccctcacatgcctggctgggaatgtcagtgcatgtgacgcccctattctctcctcttccaggtccctagactgcagggagagtggcaagaatgggcctcatgtgtaccaggacctcctgcttagccttgggactacaaacagcacgctgccccctccattttctctccaatctggaatcctgacattgaacccagttgctcagggtcagcccattcttacttccctgggatcaaatcaagaagaagcatatgtcaccatgtccagcttctaccaaaaccagtgaagtgtaagaaacccagactgaacttaccgtgagcgacaaagatgatttaaaagggaagtctagagttcctagtctccctcacagcacagagaagacaaaattagcaaaaccccactacacagtctgcaagattctgaaacattgctttgaccactcttcctgagttcagtggcactcaacatgagtcaagagcatcctgcttctaccatgtggatttggtcacaaggtttaaggtgacccaatgattcagctatttaaaaaaaaaagaggaaagaatgaaagagtaaaggaaatgattgaggagtgaggaaggcaggaagagagcatgagaggaaagacagacaggaaaataaaaaatgatagttgccattattaggatttaatatatatccagtgctttgcaagtgctctgcgcaccttgtctcactccatcctgacaataatcctgggaggtgtgtgcaattactacgactactctcttttttatagatcattaaattcagaactaaggagttaagtaacttgtccaagttgttcacacagtgaagggaggggccaagatatgatggctgggagtctaattgcagttccctgagccatgtgcctttctcttcactgaggactgccccattcttgagtgccaaacgtcactagtaacagggtgtgcctagataatttatgatccaaactgagtcagtttggaaagtgaaagggaaacttacatataatccctccgggacaatgagcaaaaactaggactgtccccagacaaatgtgaacatacatatcatcacttaaattaaaatggctatgagaaagaaagagggggagaaacagtcttgcgggtgtgaagtcccatgaccagccatgtcaaaagaaggtaaagaagtcaagaaaaagccatgaagcccatttgatttcatttttctgaaaataggctcaagagggaataaattagaaactcacaatttctcttgtttgttaccaagacagtgattctcttgctgctaccacccaactgcatccgtccatgatctcagaggaaactgtcgctgaccctggacatgggtacgtttgacgagtgagaggaggcatgacccctcccatgtgtatagacactaccccaacctaaattcatccctaaattgtcccaagttctccagcaatagaggctgccacaaacttcagggagaaagagttacaagtacatgcaatgagtgaactgactgtggctacattcttgaagatatacggaagagacgtattattaatgcttgacatatatcatcttgcctttcttggtctagactgacttctaatgactaactcaaagtcaaggcaactgagtaatgtcagctcagcaaagtgcagcaaacccatctcccacaggcctccaaaccctggctgttcacagaaccacaaagggcagatgctgcacagaaaactagagaaggggtcataggttcatggttttgtttgagatttgttgctactgtttttctgttttgaattttcttctttgttctgtttttactttatttagggggactaggtgtttctgatattttagttttcttgtttgttttgttttgtgttgtctgtgaatggggttttaactgtggatgaatggaccttatctgttggcttaaaggactggtaaaatcagaccatcttattcttcaggtgaatgttttactttccaaagtgctctcctctgcaccagcagtaataaatacaatgccataatcccttaggtttgcctagtgcttttgcaattttcaaagcacttccataagcattccttccacctccttgataggcatttatggaaagcctgctacatgtcaatcatactgttaggcacaggggacctaaagacacataaaaggatggcattctgcctcataaattgcaaaacctaatgaaagtgactgcttggtaaacaaattattattatattataaaatgctataaaagagccatattgaaagtgccctgttggagacagggcaaatgccacaaaaatgatgtaaatttacatggaggaaaagtagaatctgcctggtttgtaggcagcagaagacatttttcatcagtgggcaggtgttctttaccttttgtagaaatgggagtcaagtctcaaataggaggctccacaaaatctcatgccaggtctctgataccttattcacagaagttctttgaagtatttattgttattttctttgacttatgggaaaactgggacacaggaagacaggtaaattacccaacctcacacgttaagtcagaactgggagccataattttgtatccctggtataaatagacaatctctcgaagaaatgaagagatgaccatagaaaaacatcgagatatctccagctctaaaatcctttgtttcaatgttgtttggcatatgttatctttggaatttagtgtctgagcctctgtctgttactgtagtatttaaaatgcatgtattataatcatataatcataactgctgttaattcttgattatatacctagggacaatgtgtaatgtaagattactaattggttctgcccaatctcctttcagattttattaggaaaaaaaaataaacctcctgatcggagacaatgtattaatcagaagtgtaaactgccagttctatatagcatgaaatgaaaagacagctaatttggtccaacaaacatgactgggtctagggcacccaggctgattcagctgatttcctaccagcctttgcctcttccttcaatgtggtttccatgggaatttgcttcagaaaagccaagtatgggctgttcagaggtgcacacctgcattttcttagctcttctagaggggctaagagacttggtacgggccaggaagaatatgtggcagagctcctggaaatgatgcagattaggtggcatttttgtcagctctgtggtttattgttgggactattctttaaaatatccattgttcactacagtgaagatctctgatttaaccgtgtactatccacatgcattacaaacatttcgcagagctgcttagtatataagcgtacaatgtatgtaataaccatctcatatttaattaaatggtatagaagaacaa

SEQ ID NO: 642 - DNA, 1021 bp, Homo sapiens
ccgagctggcctccggggcaccgaccgctataaaggccagtcggactgcgacacagcccatcccctcgaccgctcgcgtcgcatttggccgcctccctaccgctccaagcccagccctcagccatggcatgccccctggatcaggccattggcctcctcgtggccatcttccacaagtactccggcagggagggtgacaagcacaccctgagcaagaaggagctgaaggagctgatccagaaggagctcaccattggctcgaagctgcaggatgctgaaattgcaaggctgatggaagacttggaccggaacaaggaccaggaggtgaacttccaggagtatgtcaccttcctgggggccttggctttgatctacaatgaagccctcaagggctgaaaataaatagggaagatggagacaccctctgggggtcctctctgagtcaaatccagtggtgggttattgtacaataacccaccactggatttgactcagagaggacccccagagggtgtctccatcttccctatttattttcagcccttgagggcttcattgtagatcaaagccaaggcccccaggaaggtgacatactcctggaagttcacctcctggtccttgttccggtccaagtcttccatcagccttgcaatttcagcatcctgcagcttcgagccaatggtgagctccttctggatcagctccttcagctccttcttgctcagggtgtgcttgtcaccctccctgccggagtacttgtggaagatggccacgaggaggccaatggcctgatccagggggcatgccatggctgagggctgggcttggagctggcacagcactgctgctcctgactatccctccagcgggggagcgccacagatggccccagtctggatccagcggctgaactgggcaggggatggctggacccccagcgtgagggcagctggccctggaaagtacccagggctcctggagagaactcaccggtagggaggcggccaaatgcgacgcgagc

SEQ ID NO: 643 - DNA, 1897 bp, Homo sapiens
  modified_base (77): a, t, c, g, other or unknown
  modified_base (1669)..(1670): a, t, c, g, other or unknown
  modified_base (1672): a, t, c, g, other or unknown
  modified_base (1683): a, t, c, g, other or unknown
ggacgcgcgccgtgagcttaagctgctgctgctgggaactggtgaaagtgggaaaagcacctttatcaagcagatgngaattatccatgggtctggttacagcgacgaagacagaaaggggttcacgaagctggtttaccaaaacatattcaccgccatgcaagccatgatcagagcgatggacacgctaaggatacagtatgtgtgtgaacagaataaggaaaatgcccagataatcagagaagtggaagtggacaaggtctccatgctctccagggagcaggtggaggccatcaagcagctctggcaagatccaggcatccaggagtgttacgacaggaggagggagtaccagctgtcggactctgccaaatattacctgactgacattgaccgcatcgccacaccatcattcgtgcctacccaacaagatgtgcttcgcgtccgagtgcccaccaccggcatcattgagtatccatttgacttggaaaacatcatctttcggatggtggatgttggtggccaacgatcggaaagacggaagtggattcactgctttgagagtgtcacctccattattttcttggttgctctgagtgaatatgaccaggtcctggctgagtgtgacaacgagaatcgcatggaagagagcaaagccttatttaaaaccatcatcacctacccctggtttctgaattcatctgtgattttattcttgaacaagaaggatcttttggaagagaaaatcatgtactctcatctaattagctatttcccagaatacacaggaccgaaacaggatgtcagagctgccagagactttatcctgaagctttaccaagatcagaatcctgacaaagagaaagtcatctactctcacttcacatgtgctacagatacagacaatattcgctttgtgtttgctgctgtcaaagacacaattctacagctaaacctaagggaattcaaccttgtctaaaagctgctgcccactcctcccctataacagaagatgtgatttgcaaactccttgttttatttgcaagtgcttctgacatcaccagagccagccccatgccaggaactaaggatgtcatgtagatcgtggggacagagatgggtgatggaacttggaagatatttgagtttaccaacatactttaaaagtccttacatcccaaattgtgtttataattattttcttgacttttggctataagattttgtgtaatttttgaatttggtgttttctagaatttttaaaagccactttgatttagttttaaatatgtttaaaaatagcgattaaaattatgtaagcaaggagcctgttagtttatagatcatgccttcaaacctctagagttaatttgggtgacttttttaaaaataagaatgttaatgggtttgaagctttttattaaaccttgtaatttagagacatttttaattgtgtttctcacctcatgctgaagggtgactcctttaacatgccaccaaagattttttttaaacacttggttctttttgtgtgttaactttctaagccaaattaatggatatataagtatatctaatttagctttgccacagtttgatcaccaagaagccaaagctgacatagagtaaatgggctctagatagcatatatgttttattggtgaaaaanngntgtggtgtgcnccgtgtgttgtgtgtgtacatttttacccccaatgtatatgaccagatcttaaaaatgtatgaaatggctagaagtccacattgtttgacaaatgttacgtaaccctgccaaagttctgatggccaccacagatttgctgtttgaattatgtatgctgtgcctttctgaggaggctaagaatataccattctgctattaaaaaaaaaaaaaagg

SEQ ID NO: 644 - DNA, 2845 bp, Homo sapiens
gggagagcctggcgagctgaaacccgagctcccgctcagctggggctcggggaggtccctgtaaaacccgcctgcccccggcctccctgggtccctcctctccctccccagtagacgctcgggcaccagccgcggcaaggatggagctgggttgctggacgcagttggggctcacttttcttcagctccttctcatctcgtccttgccaagagagtacacagtcattaatgaagcctgccctggagcagagtggaatatcatgtgtcgggagtgctgtgaatatgatcagattgagtgcgtctgccccggaaagagggaagtcgtgggttataccatcccttgctgcaggaatgaggagaatgagtgtgactcctgcctgatccacccaggttgtaccatctttgaaaactgcaagagctgccgaaatggctcatgggggggtaccttggatgacttctatgtgaaggggttctactgtgcagagtgccgagcaggctggtacggaggagactgcatgcgatgtggccaggttctgcgagccccaaagggtcagattttgttggaaagctatcccctaaatgctcactgtgaatggaccattcatgctaaacctgggtttgtcatccaactaagatttgtcatgttgagcctggagtttgactacatgtgccagtatgactatgttgaggttcgtgatggagacaaccgcgatggccagatcatcaagcgtgtctgtggcaacgagcggccagctcctatccagagcataggatcctcactccacgtcctcttccactccgatggctccaagaattttgacggtttccatgccatttatgaggagatcacagcatgctcctcatccccttgtttccatgacggcacgtgcgtccttgacaaggctggatcttacaagtgtgcctgcttggcaggctatactgggcagcgctgtgaaaatctccttgaagaaagaaactgctcagaccctgggggcccagtcaatgggtaccagaaaataacagggggccctgggcttatcaacggacgccatgctaaaattggcaccgtggtgtctttcttttgtaacaactcctatgttcttagtggcaatgagaaaagaacttgccagcagaatggagagtggtcagggaaacagcccatctgcataaaagcctgccgagaaccaaagatttcagacctggtgagaaggagagttcttccgatgcaggttcagtcaagggagacaccattacaccagctatactcagcggccttcagcaagcagaaactgcagagtgcccctaccaagaagccagcccttccctttggagatctgcccatgggataccaacatctgcatacccagctccagtatgagtgcatctcacccttctaccgccggcctgggcagcagcaggaggacatgtctgaggactgggaagtggagtgggcgggcaccatcctgcatccctatctgcgggaaaattgagaacatcactgctccaaagacccaagggttgcgctggccgtggcaggcagccatctacaggaggaccagcggggtgcatgacggcagcctacacaagggagcgtggttcctagtctgcagcggtgccctggtgaatgagcgcactgtggtggtggctgcccactgtgttactgacctggggaaggtcaccatgatcaagacagcagacctgaaagttgttttggggaaattctaccgggatgatgaccgggatgagaagaccatccagagcctacagatttctgctatcattctgcatcccaactatgaccccatcctgcttgatgctgacatcgccatcctgaagctcctagacaaggcccgtatcagcacccgagtccagcccatctgcctcgctgccagtcgggatctcagcacttccttccaggagtcccacatcactgtggctggctggaatgtcctggcagacgtgaggagccctggcttcaagaacgacacactgcgctctggggtggtcagtgtggtggactcgctgctgtgtgaggagcagcatgaggaccatggcatcccagtgagtgtcactgataacatgttctgtgccagctgggaacccactgccccttctgatatctgcactgcagagacaggaggcatcgcggctgtgtccttcccgggacgagcatctcctgagccacgctggcatctgatgggactggtcagctggagctatgataaaacatgcagccacaggctctccactgccttcaccaaggtgctgccttttaaagactggattgaaagaaatatgaaatgaaccatgctcatgcactccttgagaagtgtttctgtatatccgtctgtacgtgtgtcattgcgtgaagcagtgtgggcctgaagtgtgatttggcctgtgaacttggctgtgccagggcttctgacttcagggacaaaactcagtgaagggtgagtagacctccattgctggtaggctgatgccgcgtccactactaggacagccaattggaagatgccagggcttgcaagaagtaagtttcttcaaagaagaccatatacaaaacctctccactccactgacctggtggtcttccccaactttcagttatacgaatgccatcagcttgaccagggaagatctgggcttcatgaggccccttttgaggctctcaagttctagagagctgcctgtgggacagcccagggcagcagagctgggatgtggtgcatgcctttgtgtacatggccacagtacagtctggtccttttccttccccatctcttgtacacattttaataaaataagggttggcttctgaactacaaaaaaaaaaaaaagg

SEQ ID NO: 645 - DNA, 3894 bp, Homo sapiens
cactgccgctgctgtctgcggggtctggcgccggggtctgagtctctgctggctaagccgccgcctcagccgcctcagtcgcctcaatctcgccttccgccctcgctctccctccgcgccaccagaccccgtagccccgcgcgcccccagccctttaagccagatgatgaacttcctgcggcgccggctgtcggacagcagcttcatcgccaacctgcccaacggctacatgaccgacctgcagcggcccgagccccagcagccgccgccgccgccgccccccggtccgggcgccgcctcggcctcggcggcgcccccgaccgcctcgccgggcccggagcggaggccgccgcccgcctcggcgcccgccgcgcagcccgcgccgacgccgtcggtgggcagcagcttcttcagctcgctgtcccaagccgtgaagcagacggccgcctcggctggcctggtggacgcgcccgctcccgcgcccgcagccgccaggaaggccaaggtgctgctggtggtcgacgagccgcacgccgactgggccaagtgctttcggggcaaaaaaagtccttggagattatgatatcaaggtggaacaggcagaattttcagagctcaacctggtggcccatgcagatggcacctatgctgtggatatgcaggttctccggaatggcacaaaggttgtccggtccttccggccagacttcgtgctcatccggcagcatgcatttggcatggcggagaatgaggacttccgccacctgatcattggtatgcagtatgcaggcctccccagcatcaactcactggaatccatatacaacttctgtgacaagccatgggtgtttgcccagctggtcgctatctataagacactgggaggagaaaagttccctctcattgaacagacatactaccccaaccacaaagagatgctgacactgcccacgttccctgtggtggtgaagattggccacgctcactcaggcatgggcaaggtcaaagtggaaaaccactacgacttccaggacattgccagcgtggtggctctcacccagacctatgccactgcagagcctttcattgactccaagtatgacatccgggtccagaagattggcaacaactacaaggcttacatgaggacatcgatctcagggaactggaagacgaacactggctctgcgatgctggagcagattgccatgtcagacaggtacaaactgtgggtggacacctgctctgagatgtttggcggcctggacatctgtgctgtcaaagctgtacatggcaaagatgggaaagactacatttttgaggtcatggactgtagcatgccactgattggggaacatcaggtggaggacaggcaactcatcaccgaactagtcatcagcaagatgaaccagctgctgtccaggactcctgccctgtctcctcagagacccctaacaacccagcagccacagagcggaacacttaaggatccggactcaagcaagaccccacctcagcggccaccccctcaaggttgtttacagtatattctcgactgtaatggcattgcagtagggccaaaacaagtccaagcttcttaaaatgattggtggttaatttttcaaagcagaaattttaagccaaaaacaaacgaaaggaaagcggggaggggaaaacagaccctcccactggtgccgttgctgcgttctttcaatgctgactggactgtgtttttcctatgcagtgtcagctcctctgtctggttgtttacctgttcctgttcgtgcttgtaatgctcacttatgttttctctgtataacttgtgattccagggctgtttgtcaacagtatacaaaagaattgtgcctctcccaagtccagtgtgactttatcttctgggtggtttgatagtgtttttaaaagtaatatataatgtggggtgaaatgggagtaggggggtggacaggggagaaacgaaaaccacaaaaagaaaacccaactcctctcctccccccaagctcagttaaatcccccacctccaactttccctccaccagtgtgcttgggatcttcaatgaactgtgcttttcgctttctttctgcatgactattgtaactagatagaacattaagagattttcaagatcaaacttccatagcttcatccactgaatttgaaggcatccacctttttctccatttgctaaaatttggtgcagtttgagtttatgtgaataggctggctgtgcctgtagagctcttgtgtttttagtgatgacatgaaatacaaagaacaagctatttccaggaatgtgttctgtattttacatcccagtgtaccctttattttattattaactaattaactatgagatttttaaaaaatggggccgctgatgtgcaatatcaaagtgaacttgtgagtattttgtgtgtgttgatctcagttgtttcttcattgttgctgtttctggatccagccatgtgtgcgcttgtgtggacctgaggctgctttctgttcccaaagcttgacctgtgtacagagataattccttggcaatgttggacatagaatgcagggagctactgaaggtctgtcagggatttgtccattctgctcttggcctctcctgaggcctcataatgggagaccaaatcaaaaatgtcccatgtcacttgagtgggtacactgcctacagaaccttgaggttgactcctgcttcagttctcagctgtttaccacagccctccagggtccaaagattgaggagctttctctttcctgggaggaactgtctcagatttagcttgtgtgtgttttggacagaggctccacagcggtggctcttgaggaatcctcaccagtttgttctcttccctctgacaagcagcacctgagcagatgctgaggcagttcattaaaccaggcctcagcttcagtgcctcatcttgccatctcccggccaggctgggaacgggcaccaagcagccgcctctaacaaacaccatggtccgtggaagttcatgccagcagcttgcctttgagaagaaatgctgctggctctatttttacattcccttccacctctatactgtcatgtcaccgttctgaactcccagatctgagaaggaactagtgttggtggtatgtaacaagagttacgtatccaggggcttgtgccttggtttctcctttgattgctggtaaattctgaggccacagagaaatgcattgagtgtgaatgttgtcatctgtaatccctccctcagctgataatggtagttgatctgttgtaaatatatacatatatgcatatttgcacttccagatgggttgcataagaatcaggtccttaaatacctcccaatctgatgaaacgatagaataaagtaacatttcccagaatggaggaatacattattttatcgtatatttttgtccaagcgatgagctgacggtggtattgcttctctgcatgttatcagtgtgtacatctggtgcttttcatgtgtcatttgtgagccacaaatgcaaagttgccatttgaattcagtcaggctacagggtggtgtcagtcaaggtctttcaggtgggggagaaattggttagggctcccactgccaaatgcaagcagatagcataacctgactgttatgtgccctcaggcagcatgcttagggacaactctgtggcctgggggacatctgtgtcacagtataggattgccattcaggtgttttgtacctatttctttcctgacgttgtcccctttttttgtactgatccaactgggagaacctcagccaatgctggaagtatgattgaagtacctctcttttgtgactcttgtacagcttaatgtgcaataaaggaaaagttatatctgtcaaaaa

SEQ ID NO: 646 - DNA, 4518 bp, Homo sapiens
  modified_base (3974): a, t, c, g, other or unknown
  modified_base (3976)..(4021): a, t, c, g, other or unknown
  modified_base (4481)..(4482): a, t, c, g, other or unknown
  modified_base (4484)..(4485): a, t, c, g, other or unknown
  modified_base (4487)..(4489): a, t, c, g, other or unknown
  modified_base (4493)..(4494): a, t, c, g, other or unknown
  modified_base (4498)..(4500): a, t, c, g, other or unknown
  modified_base (4502)..(4504): a, t, c, g, other or unknown
cgggggagtctcggcgctgggcgcgttcggagcccaagtcgcggccgccgagcggagccagcccctcccctacccggagcagcccgctgggtgcctgtcccgagcggcgacacactaggagtcccggccggccagccaggcagccgcggtcccgggactcggccgtgagtgctgcgggacggatggtggcggcggggcgcgggccacggcgggcgccgtggagccgggcgccgtgagccggagctgcgcgcggggcatgcggctgcgccccggcccctcggcccccggcctcggcccccgcgctccggccccagccccggccgccggcccccgcggagtgcagcgaccgcgccgccgctgagggaggcgccccaccatgccgcgggccccggcgccgctgtacgcctgcctcctggggctctgcgcgctcctgccccggctcgcaggtctcaacatatgcactagtggaagtgccacctcatgtgaagaatgtctgctaatccacccaaaatgtgcctggtgctccaaagaggacttcggaagcccacggtccatcacctctcggtgtgatctgagggcaaaccttgtcaaaaatggctgtggaggtgagatagagagcccagccagcagcttccatgtcctgaggagcctgcccctcagcagcaagggttcgggctctgcaggctgggacgtcattcagatgacaccacaggagattgccgtgaacctccggcccggtgacaagaccaccttccagctacaggttcgccaggtggaggactatcctgtggacctgtactacctgatggacctctccctgtccatgaaggatgacttggacaatatccggagcctgggcaccaaactcgcggaggagatgaggaagctcaccagcaacttccggttgggatttgggtcttttgttgataaggacatctctcctttctcctacacggcaccgaggtaccagaccaatccgtgcattggttacaagttgtttccaaattgcgtcccctcctttgggttccgccatctgctgcctctcacagacagagtggacagcttcaatgaggaagttcggaaacagagggtgtcccggaaccgagatgcccctgaggggggctttgatgcagtactccaggcagccgtctgcaaggagaagattggctggcgaaaggatgcactgcatttgctggtgttcacaacagatgatgtgccccacatcgcattggatggaaaattgggaggcctggtgcagccacacgatggccagtgccacctgaacgaggccaacgagtacactgcatccaaccagatggactatccatcccttgccttgcttggagagaaattggcagagaacaacatcaacctcatctttgcagtgacaaaaaaccattatatgctgtacaagaattttacagccctgatacctggaacaacggtggagattttagatggagactccaaaaatattattcaactgattattaatgcatacaatagtatccggtctaaagtggagttgtcagtctgggatcagcctgaggatcttaatctcttctttactgctacctgccaagatggggtatcctatcctggtcagaggaagtgtgagggtctgaagattggggacacggcatcttttgaagtatcattggaggcccgaagctgtcccagcagacacacggagcatgtgtttgccctgcggccggtgggattccgggacagcctggaggtgggggtcacctacaactgcacgtgcggctgcagcgtggggctggaacccaacagcgccaggtgcaacgggagcgggacctatgtctgcggcctgtgtgagtgcagccccggctacctgggcaccaggtgcgagtgccaggatggggagaaccagagcgtgtaccagaacctgtgccgggaggcagagggcaagccactgtgcagcgggcgtggggactgcagctgcaaccagtgctcctgcttcgagagcgagtttggcaagatctatgggcctttctgtgagtgcgacaacttctcctgtgccaggaacaagggagtcctctgctcaggccatggcgagtgtcactgcggggaatgcaagtgccatgcaggttacatcggggacaactgtaactgctcgacagacatcagcacatgccggggcagagatggccagatctgcagcgagcgtgggcactgtctctgtgggcagtgccaatgcacggagccgggggcctttggggagatgtgtgagaagtgccccacctgcccggatgcatgcagcaccaagagagattgcgtcgagtgcctgctgctccactctgggaaacctgacaaccagacctgccacagcctatgcagggatgaggtgatcacatgggtggacaccatcgtgaaagatgaccaggaggctgtgctatgtttctacaaaaccgccaaggactgcgtcatgatgttcacctatgtggagctccccagtgggaagtccaacctgaccgtcctcagggagccagagtgtggaaacacccccaacgccatgaccatcctcctggctgtggtcggtagcatcctccttgttgggcttgcactcctggctatctggaagctgcttgtcaccatccacgaccggagggagtttgcaaagtttcagagcgagcgatccagggcccgctatgaaatggcttcaaatccattatacagaaagcctatctccacgcacactgtggacttcaccttcaacaagttcaacaaatcctacaatggcactgtggactgatgtttccttctccgaggggctggagcggggatctgatgaaaaggtcagactgaaacgccttgcacggctgctcggcttgatcacagctccctaggtaggcaccacagagaagaccttctagtgagcctgggccaggagcccacagtgcctgtacaggaaggtgcctggccatgtcacctggctgctaggccagagccatgccaggctgcgtccctccgagcttgggataaagcaaggggaccttgggcgctctcagctttccctgccacatccagcttgttgtcccaatgaaatactgagatgctgggctgtctctcccttccaggaatgctgggcccccagcctggccagacaagaagactgtcaggaagggtcggagtctgtaaaaccagcatacagtttggcttttttcacattgatcatttttatatgaaataaaaagatcctgcatttatggtgtagttctgagtcctgagacttttctgcgtgatggctatgccttgcacacaggtgttggtgatggggctgttgagatgcctgttgaaggtacatcgtttgcaaatgtcagtttcctctcctgtccgtgtttgtttagtacttttataatgaaaagaaacaagattgtttgggattggaagtaaagattaaaaccaaaagaatttgtgtttgtctgatactctctgtgtgtttctttctttctgagcggacttaaaatggtgcccccagtggggattgaagcggccgtgtacttcctcagggatgggacacaggctggtctgatactccagactgcagcttgtcaagtaagcatgaggtgctcggggcagtgagggctgtgcaagggggaacactgagcagatagatacctttggccccttccagcttttactgacagagagttccaggctagacaccataaaaaccaccccttggtctccctcccttgttctgaggggctgaggctggaaatagattgtacagacaagcaagggttgagtggtggttcccacacgaagtcatctcttaaacatcattagcaatagcagttcccttccaaggcctcccctcactcccgaaacacttacgtcccatgcaggcccaatgcaaaaaaacacatttgagcttttttcccgcagggccatgaagtccccttaagttcccatatctaagatggttgactgaccctctccccttatgnannnnnnnnnnnnnnnnnnnnnnnnnnnnnnnnnnnnnnnnnnnnnntgtttgttaggaggttactgaatgacaaactgttcctaagaccccatctcatgctggccagagggccagcctcctcattcctgcttgctcttagaaaatctttcactgatcattttttgtcactggaataacttcaaggttattatgctttcattccaaatggatctgtcctcagctctggacccaattccccttacttcattttggcaaacactaagtcaaatagtgaaatgcctgtcactacatagaacctattacctggggcaaatacgaacagattgagtttccttcatcttgtgtaaatatgatgaaacagagacctggtaacttggtgacactgttaaaccctttttgggataaagccaaatgtaaatgaaaacattaaacagataaattgtggcgttgagacttttctgaattgagaaaaataaatgtaattttggaagaaaaaaaaaaaaannannannngganncagnnnannnaaaaaaaaaaaggg

SEQ ID NO: 647 - DNA, 5279 bp, Homo sapiens
gggtccgaccgcgctcgccttccttgcagccgcgcctcggccccatggacgccctgtgcggttccggggagctcggctccaagttctgggactccaacctgtctgtgcacacagaaaacccggacctcactccctgcttccagaactccctgctggcctgggtgccctgcatctacctgtgggtcgccctgccctgctacttgctctacctgcggcaccattgtcgtggctacatcatcctctcccacctgtccaagctcaagatggtcctgggtgtcctgctgtggtgcgtctcctgggcggaccttttttactccttccatggcctggtccatggccgggcccctgcccctgttttctttgtcacccccttggtggtgggggtcaccatgctgctggccaccctgctgatacagtatgagcggctgcagggcgtacagtcttcgggggtcctcattatcttctggttcctgtgtgtggtctgcgccatcgtcccattccgctccaagatccttttagccaaggcagagggtgagatctcagaccccttccgcttcaccaccttctacatccactttgccctggtactctctgccctcatcttggcctgcttcagggagaaacctccatttttctccgcaaagaatgtcgaccctaacccctaccctgagaccagcgctggctttctctcccgcctgtttttctggtggttcacaaagatggccatctatggctaccggcatcccctggaggagaaggacctctggtccctaaaggaagaggacagatcccagatggtggtgcagcagctgctggaggcatggaggaagcaggaaaagcagacggcacgacacaaggcttcagcagcacctgggaaaaatgcctccggcgaggacgaggtgctgctgggtgcccggcccaggccccggaagccctccttcctgaaggccctgctggccaccttcggctccagcttcctcatcagtgcctgcttcaagcttatccaggacctgctctccttcatcaatccacagctgctcagcatcctgatcaggtttatctccaaccccatggccccctcctggtggggcttcctggtggctgggctgatgttcctgtgctccatgatgcagtcgctgatcttacaacactattaccactacatctttgtgactggggtgaagtttcgtactgggatcatgggtgtcatctacaggaaggctctggttatcaccaactcagtcaaacgtgcgtccactgtgggggaaattgtcaacctcatgtcagtggatgcccagcgcttcatggaccttgcccccttcctcaatctgctgtggtcagcacccctgcagatcatcctggcgatctacttcctctggcagaacctaggtccctctgtcctggctggagtcgctttcatggtcttgctgattccactcaacggagctgtggccgtgaagatgcgcgccttccaggtaaagcaaatgaaattgaaggactcgcgcatcaagctgatgagtgagatcctgaacggcatcaaggtgctgaagctgtacgcctgggagcccagcttcctgaagcaggtggagggcatcaggcagggtgagctccagctgctgcgcacggcggcctacctccacaccacaaccaccttcacctggatgtgcagccccttcctggtgaccctgatcaccctctgggtgtacgtgtacgtggacccaaacaatgtgctggacgccgagaaggcctttgtgtctgtgtccttgtttaatatcttaagacttccacacaacatgctgccccagttaatcagcaacctgactcaggccagtgtgtctctgaaacggatccagcaattcctgagccaagaggaacttgacccccagagtgtggaaagaaagaccatctccccaggctattccatcacatacacagtggcaccttcacctgggcccaggacctgccccccactctgcacagcctagacatccaggtcccgaaaggggcactggtggccgtggtggggcctgtgggctgtgggaagtcctccctggtgtctgccctgctgggagagatggagaagctagaaggcaaagtgcacatgaagggctccgtggcctatgtgccccagcaggcatggatccagaactgcactcttcaggaaaacgtgcttttcggcaaagccctgaaccccaagcgctaccagcagactctggaggcctgtgccttgctagctgacctggagatgctgcctggtggggatcagacagagattggagagaagggcattaacctgtctgggggccagcggcagcgggtcagtctggctcgagctgtttacagtgatgccgatattttcttgctggatgacccactgtccgcggtggactctcatgtggccaagcacatctttgaccacgtcatcgggccagaaggcgtgctggcaggcaagacgcgagtgctggtgacgcacggcattagcttcctgccccagacagacttcatcattgtgctagctgatggacaggtgtctgagatgggcccgtacccagccctgctgcagcgcaacggctcctttgccaactttctctgcaactatgcccccgatgaggaccaagggcacctggaggacagctggaccgcgttggaaggtgcagaggataaggaggcactgctgattgaagacacactcagcaaccacacggatctgacagacaatgatccagtcacctatgtggtccagaagcagtttatgagacagctgagtgccctgtcctcagatggggagggacagggtcggcctgtaccccggaggcacctgggtccatcagagaaggtgcaggtgacagaggcgaaggcagatggggcactgacccaggaggagaaagcagccattggcactgtggagctcagtgtgttctgggattatgccaaggccgtggggctctgtaccacgctggccatctgtctcctgtatgtgggtcaaagtgcggctgccattggagccaatgtgtggctcagtgcctggacaaatgatgccatggcagacagtagacagaacaacacttccctgaggctgggcgtctatgctgctttaggaattctgcaagggttcttggtgatgctggcagccatggccatggcagcgggtggcatccaggctgcccgtgtgttgcaccaggcactgctgcacaacaagatacgctcgccacagtccttctttgacaccacaccatcaggccgcatcctgaactgcttctccaaggacatctatgtcgttgatgaggttctggcccctgtcatcctcatgctgctcaattccttcttcaacgccatctccactcttgtggtcatcatggccagcacgccgctcttcactgtggtcatcctgcccctggctgtgctctacaccttagtgcagcgcttctatgcagccacatcacggcaactgaagcggctggaatcagtcagccgctcacctatctactcccacttttcggagacagtgactggtgccagtgtcatccgggcctacaaccgcagccgggattttgagatcatcagtgatactaaggtggatgccaaccagagaagctgctacccctacatcatctccaaccggtggctgagcatcggagtggagttcgtggggaactgcgtggtgctctttgctgcactatttgccgtcatcgggaggagcagcctgaacccggggctggtgggcctttctgtgtcctactccttgcaggtgacatttgctctgaactggatgatacgaatgatgtcagatttggaatctaacatcgtggctgtggagagggtcaaggagtactccaagacagagacagaggcgccctgggtggtggaaggcagccgccctcccgaaggttggcccccacgtggggaggtggagttccggaattattctgtgcgctaccggccgggcctagacctggtgctgagagacctgagtctgcatgtgcacggtggcgagaaggtggggatcgtgggccgcactggggctggcaagtcttccatgaccctttgcctgttccgcatcctggaggcggcaaagggtgaaatccgcattgatggcctcaatgtggcagacatcggcctccatgacctgcgctctcagctgaccatcatcccgcaggaccccatcctgttctcggggaccctgcgcatgaacctggaccccttcggcagctactcagaggaggacatttggtgggctttggagctgtcccacctgcacacgtttgtgagctcccagccggcaggcctggacttccagtgctcagagggcggggagaatctcagcgtgggccagaggcagctcgtgtgcctggcccgagccctgctccgcaagagccgcatcctggttttagacgaggccacagctgccatcgacctggagactgacaacctcatccaggctaccatccgcacccagtttgatacctgcactgtcctgaccatcgcacaccggcttaacactatcatggactacaccagggtcctggtcctggacaaaggagtagtagctgaatttgattctccagccaacctcattgcagctagaggcatcttctacgggatggccagagatgctggacttgcctaaaatatattcctgagatttcctcctggcctttcctggttttcatcaggaaggaaatgacaccaaatatgtccgcagaatggacttgatagcaaacactgggggcaccttaagattttgcacctgtaaagtgccttacagggtaactgtgctgaatgctttagatgaggaaatgatccccaagtggtgaatgacacgcctaaggtcacagctagtttgagccagttagactagtccccggtctcccgattcccaactgagtgttatttgcacactgcactgttttcaaataacgattttatgaaatgacctctgtcctccctctgatttttcatattttctaaagtttcgtttctgttttttaataaaaagctttttcctcctggaacagaagacagctgctgggtcaggccacccctaggaactcagtcctgtactctggggtgctgcctgaatccattaaaaatgggagtactgatgaaataaaactacatggtcaacagtatatacacagtagtctttttgcacttgttcacaaggtttggggattaggatctttggaggaggccaagaggaagactttctacacatgtacatggttgtagttacctgaacttcagacccaagagctcttggctgcaaatattgccttcac

SEQ ID NO: 648 - DNA, 3001 bp, Homo sapiens
  modified_base (1913): a, t, c, g, other or unknown
  modified_base (1925): a, t, c, g, other or unknown
gtctccctcggcctgtgccgccgccgacgccgcttgtgggcccgactccgctctgtctgcttcgccaccttctccccgagcactgcccggccggccgccatggctaacgtggctgacacgaagctgtacgacatcctgggcgtcccgcccggcgccagcgagaacgagctgaagaaggcatacagaaagttagccaaggaatatcatcctgataagaatccaaatgcaggagacaaatttaaagaaataagttttgcatatgaagtactatcaaatcctgagaagcgtgagttatatgacagatacggagagcaaggtcttcgggaaggcagcggcggaggtggtggcatggatgatattttctctcacatttttggtgggggattgttcggcttcatgggcaatcagagtagaagtcgaaatggcagaagaagaggagaggacatgatgcatccactcaaagtatctttagaagatctgtataatggcaagacaaccaaactacaacttagcaagaatgtgctctgtagtgcatgcagtggccaaggcggaaagtctggagctgtccaaaagtgtagtgcttgtcgaggtcgaggtgtgcgcatcatgatcagacagctggctccagggatggtacaacagatgcagtctgtgtgctctgattgtaatggagaaggagaggtaattaatgaaaaagaccgctgtaaaaaatgtgaagggaagaaggtgattaaagaagtcaagattcttgaagtccacgtagacaaaggcatgaaacatggacagagaattacattcactggggaagcagaccaggccccaggagtggaacccggagacattgttcttttgctacaggagaaagaacatgaggtatttcagagagatgggaatgatttgcacatgacatataaaataggacttgttgaagctctatgtggatttcagttcacatttaagcaccttgatggacgtcagattgtggtgaaatacccccctggcaaagtaattgaaccagggtgtgttcgtgtagttcgaggtgaagggatgccgcagtatcgtaatccctttgaaaaaggtgatctttacataaagtttgatgtgcagtttcctgaaaacaactggatcaacccagacaagctttctgaactagaagatcttctgccatctagaccggaagttcctaacataattggagaaacagaggaggtagagcttcaggaatttgatagcactcgaggctcaggaggtggtcagaggcgtgaagcctataatgatagctctgatgaagaaagcagcagccatcatggacctggagtgcagtgtgcccatcagtaaactctgcaaacaaattgcacaggtggattttctttccacatttgcctgatttgttctcagcaatccagctggagtgtcttatcaatccagatgaactgagggacatctgttggtctatgtataacttttaaaattggtatagtatctacagagtgtataatttaaactaaccacaaagctttacatcttcattttgactgttccatagcagaataaagcacttgaaaggaaacaagactccctttcacacatggattattataagtttcaatcctggtatctgtgcttgatttttatcagttttgtgtagatttttatgtttcatattttaaatttaaatcccacattgtaaagtttgtacaatttgtcctgaagctttgtgtttggctgcacctgcataagctgctacaaatagaataaagaatttcatagcctgtatctatcatttagatgcatggaaaaaaatgggctttgcacacaatgggtttggagctgactgggaacaatggaaaaaattacattagctgtggttgtaaagtttttttgtttttggttttgttttttttttctttttncttttttttttntattaccatcttgtgaaaggtttctgaaactcgataataaaaagcggttggtgtaaattattcttttgtgtcacatttttagaaggaaaaacataaaagaatgtatccttagtactggttcttaaacagcccataaaaacccattggcctgaagcttatatctcaggcctatgcccatcttatagtcttggaagacaaaaggctggtagagacagtcttcagtggcttcagtgatgctctgtagaggccagggtgtcttgagtgctgtaactcccaagcactgggctagcctgacttctgtatctccctaccaccacccccttaaaaaaataaggtaacagcaaatctatagtaaaaccatgtctgcatagaacgtgttcaaatcctctgttttcattaaatgtaaaagatgctgtctccattaagttgaatatttggaattggagaagccattgattattattttgagtttctgtaatgttttatagaaaagtaagatgcttattcagaatttaagaatgaaggcaactgaaatatgcattgttgtagttatttatatttcaaactaaaaataagcaaaaaaaaaaggctggtttgagaaaaatcaggtaaaattgatgaaacggatgttgtgtttctctttccatcatctggtttttaccatttcactcagtaggtatttttagaacacacttatttgaggaaagagacatcagatgcacaattttacatttataaaggaacaaatggggaaaactgaaaactaaaaattttaaatgtattaaatgccatccctgagcctaaatctagtatttgtagtttatttctaggtctgctagaacctgaaaacctgaatgaaaaaaggtgtgctgacactaatcaagtcctgtgaggtttaaattattgacctatccactctacctccattgtacaaaaaatattttacaacaagcctgggtaagattcaacagcatagtagttttgtatccaaggttacttccccacaaccactttaaacataagaaatgtggtggcaatataaagtttgtagcctttccaataaaggtttataaaac

SEQ ID NO: 649 - DNA, 5477 bp, Homo sapiens
  modified_base (3272)..(3304): a, t, c, g, other or unknown
  modified_base (3914)..(3931): a, t, c, g, other or unknown
ccgttctgagccgagccggaaccctagcccgagacggagccggggcccgggccggcgccattgcgcgggcgccgcgggaagaccttggcgcggggcggcgggccgggccaggccatgcgggccgagtgagccggcgcccgcagcccgcggcgcggcatggcttccccgcggaggtccgggcagcccgggccgccgccgccgccgccaccgccgcccgcgcgcctgctactgctactgctgctgccgctgctgctgcctctggcgcccggggcctggggctgggcgcggggcgccccccggccgccgcccagcagcccgccgctctccatcatgggcctcatgccgctcaccaaggaggtggccaagggcagcatcgggcgcggtgtgctccccgccgtggaactggccatcgagcagatccgcaacgagtcactcctgcgcccctacttcctcgacctgcggctctatgacacggagtgcgacaacgcaaaagggttgaaagccttctacgatgcaataaaatacgggccgaaccacttgatggtgtttggaggcgtctgtccatccgtcacatccatcattgcagagtccctccaaggctggaatctggtgcagctttcttttgctgcaaccacgcctgttctagccgataagaaaaaatacccttatttctttcggaccgtcccatcagacaatgcggtgaatccagccattctgaagttgctcaagcactaccagtggaagcgcgtgggcacgctgacgcaagacgttcagaggttctctgaggtgcggaatgacctgactggagttctgtatggcgaggacattgagatttcagacaccgagagcttctccaacgatccctgtaccagtgtcaaaaagctgaaggggaatgatgtgcggatcatccttggccagtttgaccagaatatggcagcaaaagtgttctgttgtgcatacgaggagaacatgtatggtagtaaatatcagtggatcattccgggctggtacgagccttcttggtgggagcaggtgcacacggaagccaactcatcccgctgcctccggaagaatctgcttgctgccatggagggctacattggcgtggatttcgagcccctgagctccaagcagatcaagaccatctcaggaaagactccacagcagtatgagagagagtacaacaacaagcggtcaggcgtggggcccagcaagttccacgggtacgcctacgatggcatctgggtcatcgccaagacactgcagagggccatggagacactgcatgccagcagccggcaccagcggatccaggacttcaactacacggaccacacgctgggcaggatcatcctcaatgccatgaacgagaccaacttcttcggggtcacgggtcaagttgtattccggaatggggagagaatggggaccattaaatttactcaatttcaagacagcagggaggtgaaggtgggagagtacaacgctgtggccgacacactggagatcatcaatgacaccatcaggttccaaggatccgaaccaccaaaagacaagaccatcatcctggagcagctgcggaagatctccctacctctctacagcatcctctctgccctcaccatcctcgggatgatcatggccagtgcttttctcttcttcaacatcaagaaccggaatcagaagctcataaagatgtcgagtccatacatgaacaaccttatcatccttggagggatgctctcctatgcttccatatttctctttggccttgatggatcctttgtctctgaaaagacctttgaaacactttgcaccgtcaggacctggattctcaccgtgggctacacgaccgcttttggggccatgtttgcaaagacctggagagtccacgccatcttcaaaaatgtgaaaatgaagaagaagatcatcaaggaccagaaactgcttgtgatcgtggggggcatgctgctgatcgacctgtgtatcctgatctgctggcaggctgtggaccccctgcgaaggacagtggagaagtacagcatggagccggacccagcaggacgggatatctccatccgccctctcctggagcactgtgagaacacccatatgaccatctggcttggcatcgtctatgcctacaagggacttctcatgttgttcggttgtttcttagcttgggagacccgcaacgtcagcatccccgcactcaacgacagcaagtacatcgggatgagtgtctacaacgtggggatcatgtgcatcatcggggccgctgtctccttcctgacccgggaccagcccaatgtgcagttctgcatcgtggctctggtcatcatcttctgcagcaccatcaccctctgcctggtattcgtgccgaagctcatcaccctgagaacaaacccagatgcagcaacgcagaacaggcgattccagttcactcagaatcagaagaaagaagattctaaaacgtccacctcggtcaccagtgtgaaccaagccagcacatcccgcctggagggcctacagtcagaaaaccatcgcctgcgaatgaagatcacagagctggataaagacttggaagaggtcaccatgcagctgcaggacacaccagaaaagaccacctacattaaacagaaccactaccaagagctcaatgacatcctcaacctgggaaacttcactgagagcacagatggaggaaaggccattttaaaaaatcacctcgatcaaaatccccagctacagtggaacacaacagagccctctcgaacatgcaaagatcctatagaagatataaactctccagaacacatccagcgtcggctgtccctccagctccccatcctccaccacgcctacctcccatccatcggaggcgtggacgccagctgtgtcagcccctgcgtcagccccaccgccagcccccgccacagacatgtgccaccctccttccgagtcatggtctcgggcctgtaagggtgggaggcctgggcccggggcctcccccgtgacagaaccacactgggcagaggggtctgctgcagaaacactgtcggctctggctgcggagaagctgggcaccatggctggcctctcaggaccactcggatggcactcaggtggacaggacggggcagggggagacttggcacctgacctcgagccttatttgtgaagtccttatttcttcacaaagaagaggaacggaaatgggacgtcttccttaacatctgcaaacaaggaggcgctgggatatcaaacttgcnnnnnnnnnnnnnnnnnnnnnnnnnnnnnnnnnctagacaaggagagaggcactagaactccagctggaagtcacggagtggctcgagcagccttgggaagaggcaaggagcttctgaagaaactgcctctgcacacacatcactggctgtgacccctcaggctagcccttctccactctgggggaggaggtgggaagggccaccaggcccccagctgccaggccagctgaccccagccttcctggaacagggagtctgcaggagcgcagacaggcacagccctggagcaggcaggccgagggctgcggcactggagcaggctgacttacatgctccacatgggacctgtgtcacccaatgagatgtttgttactctggtaaatgccacacgttaacacaataacacccattcctgggaccgtggggatttagggcacgtcactgcagacacgctctgcagcattcaccgacagtctgtcatgcacccaccacgttggccatgtccttgtgttcctatcggatgctcccagtaaccagggggaccacccgagctaatcatggaatgtctgttcccagcaaacacgataaagaaagattgtgcactttaacctctctcatcagggcccaagggctggctgggannnnnnnnnnnnnnnnnncccactaactttgtttctgaccaaagtgaattggaggcactctgctaaaagacatccccgtagacataggggagagagttgctggctgagggcttcccttggcttccagaaggcagccttccatccagacaagccagtgagctctccccttgggatcactggggtgatcagtcagcagattgattctcattcataagatcattcctccctttaaattgagcccctaagagcactggcctgggagtcagacagacctgggttcaagtcctcagtcccctgcccactccctacgtgactttgatcaggtcactagtgtctctctgagcctcagtttcccctctgtaattggggttgaactaaaacacctgtcctgcctacctcacaaggtcactctgaggattgaaacttgatcttgtccaggaaagctttgtaccaaacagtgaagccgccctgatccgtgaggtatgagtatgactctgaccttcagccctccctacagccgggggtgtggcccagagaagcttccagcacagccctctacccagaacatccgggctggagggaggctcccagtgacttttctgacattcctagacaggttcattctttgctcaagaaaggcctgaatgacaatgtccaggatgtctgcacaactgagcagctcgctcactccctaaagaaacctattggcagcttcaacaggcaggcaataatctcttcccagaaccactgcagtcaggaataaactgttttctccaccaggctttgacaaaagggcccacaggaatcttaccaatgccaacatttcaaagcaccctatttcacgtagcatagctttctgctccccttccccaaagagaggttatggaggtactgtagcttttagggaaaaaaaaatgttaacacatcacaggtcaagttgaagtcattctctgtttaggcactaaaaatcggtgttgtcactcactgtgtattaccagtatttacttgctttcttgatttcaccaaaaccaaatttaatttaaaggaccacattaatttttcaaagggaaagagacaattaattgtacataatgtatacacacacaaaaaaaaaatacctgtagaaatattattccagcatagcaggaaaacaaacaaaagtattggactgtcggaggtgagcctgtgcgtctgtaaccctttgtgactcctgagcgtgcgctgtcttctaggttaactcacgaagtacattctctgtcttactgatactgtaggttcacccatttttttttaatttcctcgcaaataacaagacccacagaagtgactctagctacttaatggttctgttcttttatatgcagcaaacacaccgtccatttctgaagaggcttcggcctgaaggcattttccaatgatgttagtgcacaaaacgctttaaattagactggaactgccagaatcaaatgtaaatgaggaatttctcgtacccctactgcatggtatcgatttttaataaattgttgcaaatttgtttttatgaataaaaggaaaaaacctgtcg

SEQ ID NO: 650 - DNA, 246 bp, Homo sapiens
  modified_base (80): a, t, c, g, other or unknown
  modified_base (85): a, t, c, g, other or unknown
  modified_base (88): a, t, c, g, other or unknown
  modified_base (125): a, t, c, g, other or unknown
  modified_base (135)..(136): a, t, c, g, other or unknown
  modified_base (177): a, t, c, g, other or unknown
  modified_base (186): a, t, c, g, other or unknown
  modified_base (201): a, t, c, g, other or unknown
  modified_base (228)..(229): a, t, c, g, other or unknown
  modified_base (241): a, t, c, g, other or unknown
gtgggcgcggcttcctgcagcttgggctggggatataggcgcccccacacccgggcccggctcagcgccgccgccgctcntcgcntcnttgctgcacgatggcctcgctccgggtggagcgcgcnggcggcccgnntctccctaggacccgagtcgggcggccggcagcgctccgcntcctccttntgctgggcgctgtcntgaatccccacgaggccctggctcagnntcttcccaccanaggca

SEQ ID NO: 651 - DNA, 3065 bp, Homo sapiens
gctgctgctgggcctgggcggcagggtcgagggggggccggccggcgagcggggcgcaggcgggggcggggcgctggcccgcgagcgcttcaaggtggtctttgcgccggtgatctgcaagcggacctgtctcaagggccagtgtcgggacagttgtcagcaggcccgcgagcgcttcaaggtggtctttgcgccggtgatctgcaagcggacctgtctcaagggccagtgtcgggacagttgtcagcagggctccaacatgacgctcatcggagagaacggccacagcacagacacgctcacgggctccggcttccgcgtggtggtgtgccctctcccctgcatgaatggcggccagtgctcctcgcgaaaccagtgcctgtgtcccccggacttcactgggcgcttctgccaggtgcccgcaggaggagccggtgggggtaccggcggctcaggccccggcctgagcaggacaggggccctgtccacaggggcgctgccgcccctggctccggagggcgactctgtggccagcaagcacgccatctacgccgtccaggtgatcgctgaccctcctgggcccggggaggggcctcctgcccagcacgcagccttcctggtgcccctaggcccgggacagatctcagcagaaggtaccaggcaactggcaaacccgggaaggtcgccagtgggtgggcactagggtggccagggcagggcaggttcagccctggaggagctcagcgcggtgacccgcggcgcggtgcgggcagccctgaggccaccgcgcccgcccccagtgcaggccccgccccccgtggtgaatgtgcgcgtccatcacccgcccgaggcctcagtccaggtgcaccgcattgagagctcgaacgccgagagcgcagccccctcccagcacctgctgccgcaccccaagccctcgcacccccggccgcccacccagaagcccctgggccgctgctttcaggacactctgcccaagcagccgtgtggcagcaaccccctccccggcctcaccaagcaggaagactgctgcggtagcatcggcactgcctggggccagagcaagtgccacaagtgtccccagctgcagtacacaggagtgcagaagccagggcctgtacgtggggaagtgggcgctgactgtccccagggctacaagaggcttaacagcacccactgccaggacatcaacgagtgcgcaatgccgggcgtgtgtcgccatggtgactgcctcaacaaccctggctcctatcgctgtgtctgcccacctggccatagtttaggcccctcccgtacacagtgcattgcagacaaaccggaggagaagagcctgtgtttccgcctggtgagccctgagcaccagtgccagcacccactgaccacccgcctgacccgccagctctgctgctgcagtgtcggcaaggcctggggcgcgcggtgtcagcgctgcccaacagatggcaccgctgcgttcaaggagatctgcccagctgggaagggataccacattctcacctcccaccagacgctcaccattcagggcgagagtgacttttcccttttcctgcaccctgacgggccacccaagccccagcagcttccggagagccctagccaggctccaccacctgaggacacagaggaagagagaggggtgaccacggactcaccggtgagtgaggagaggtcagtgcagcagagccacccaactgccaccacgactcctgcccggccctaccccgagctgatctcccgtccctcgcccccgaccatgcgctggttcctgccggacttgcctccttcccgcagcgccgtagagatcgctcccactcaggtcacagagactgatgagtgccgactgaaccagaacatctgtggccacggagagtgcgtgccgggcccccctgactactcctgccactgcaaccccggctaccggtcacatccccagcaccgctactgcgtggatgtgaacgagtgcgaggcagagccctgtggcccggggaggggcatctgcatgaacaccggcggctcctacaattgccactgcaaccgcggctaccgcctgcacgtgggcgccggggggcgctcgtgcgtggacctgaacgaatgcgccaagccccacctgtgcggcgacggcggcttctgcatcaactttcccggtcactacaagtgcaactgctaccccggctaccggctcaaagcctcccggcctcctgtgtgcgaagacatcgacgagtgccgggacccaagctcttgcccggatggcaaatgcgagaacaagcccgggagcttcaagtgcatcgcctgtcagcctggctaccgcagccaggggggcggggcctgtcgcgacgtgaacgagtgcgccgagggcagcccctgctcgcctggctggtgcgagaacctcccgggctccttccgctgcacctgtgcccagggctacgcgcccgcgcccgacggccgcagttgcttggatgtggacgagtgtgaggctggggacgtgtgtgacaatggcatctgcagcaacacgccaggatctttccagtgtcagtgcctctctggctaccatctgtccagggaccggagccactgcgaggacattgatgagtgtgacttccctgcagcctgcattgggggtgactgcatcaataccaatggctcctacagatgtctttgcccccaggggcatcggctggtgggtggcaggaaatgccaagacatagatgagtgcagccaggacccgagcctgtgccttccccatggggcctgcaagaaccttcagggctcctatgtgtgtgtctgcgatgagggcttcactcccacccaggaccagcacggttgtgaggaggtggagcagccccaccacaagaaggagtgctacctgaacttcgatgacacagtgttctgcgacagcgtattggccaccaacgtgacccagcaggagtgctgctgctctctgggggccggctggggcgaccactgcgaaatctacccctgcccagtctacagctcagccgagttccacacaacatacgagcatgcgaaag

SEQ ID NO: 652 - DNA, 250 bp, Homo sapiens
  modified_base (40): a, t, c, g, other or unknown
  modified_base (45): a, t, c, g, other or unknown
  modified_base (132): a, t, c, g, other or unknown
ggcgggcaggcgactcctgtcccgggtggaggcggcggancggangccgggggagggggcagcggctgtctcacggaccacggcggcgcccgcagctcctcaccgaaacaaggagaccagtgctggtccaanggctgtgatgggaaaagattattacaagattcttgggatcccatcgggggccaacgaggatgagatcaagaaagcctaccggaagatggccttgaagtaccacccagacaagaataaa

SEQ ID NO: 653 - DNA, 5443 bp, Homo sapiens
  modified_base (56): a, t, c, g, other or unknown
  modified_base (2223)..(2243): a, t, c, g, other or unknown
  modified_base (4836): a, t, c, g, other or unknown
  modified_base (4840): a, t, c, g, other or unknown
  modified_base (4842): a, t, c, g, other or unknown
  modified_base (5084): a, t, c, g, other or unknown
  modified_base (5102): a, t, c, g, other or unknown
  modified_base (5209): a, t, c, g, other or unknown
  modified_base (5345): a, t, c, g, other or unknown
  modified_base (5402): a, t, c, g, other or unknown
  modified_base (5419): a, t, c, g, other or unknown
cccagctctcctggccccaacgcgggcttagcctcccgccttggctcgggcaggancccgtcgacccttcggcccctttcgcccgccctggagctgggggcagggtgccagtggaagcgtggggcttggctctgtgattcattcattctccgccgacgggagcctcagacccgctgtgctctgaagagaggagggaagagggggcagccgcgaatgaagggccgggcaccagccgggctccattgtgctcggcggcggggggcgggaaggggctgagggaggtgggatcgggtcccctcctccagctctccggcgtgcgctgcgcccccagcctgctgccagcctggaaatggctccgtttattctcttcgggagaatgaatcgatcctgcctagccttctcttcgtcctccccacctcttctctgctccgagtcttaggaggagaaacatttaaaaagacagattccaatgtggagtgccgtgcaggttgcgagctgccgggtttgcacttcgaggagattttcctgtgtagtttttttcctaatgtgagcgcagggaagccgtggcattactgcttttgggatttttattcacgtgcacgtcgcgtttggttgctcgctccacccccggagacctggtgtggtggagaaatttgaacccgcagccttagctccgaaaaggccgagttacctggctctccctgagtgtcgaggaggacatgagtgaaatgaccagcgaactcattttttataggactcggtgaagccggattctgcatttccctacttgtagactcattttgtggaatagagttgatcgctgtctcctccgcaaagcattttaactcgaataagcaaatgccgcctctgtttgaacgttttggtatttacaagagagaaatcattttacctaagagaactaattgaattggcagcatccttgaaatacctccggacaaggatctgggggtgggggtggaaaagcaactgcgaaatagcagacggagaaattcctttggaagttattccgtagcataagagctgaaacttcagagcaagttttcattgggcaaaatgggggaacaacctatcttcagcactcgagctcatgtcttccaaattgacccaaacacaaagaagaactgggtacccaccagcaagcatgcagttactgtgtcttatttctatgacagcacaagaaatgtgtataggataatcagtttagatggctcaaaggcaataataaatagtaccatcaccccaaacatgacatttactaaaacatctcagaagtttggccagtgggctgatagccgggcaaacaccgtttatggattgggattctcctctgagcatcatctttcgaaatttgcagaaaagtttcaggaatttaaagaagctgctcgactagcaaaggaaaaatcacaagagaagatggaacttaccagtacaccttcacaggaatccgcaggcggggatcttcagtctcctttaacaccggaaagtatcaacgggacagatgatgaaagaacacctgatgtgacacagaactcagagccaagggctgaaccaactcagaatgcattgccattttcacatagttcagcaatcagcaaacattgggaggctgaactggctaccctcaaaggaaataatgccaaactcactgcagccctgctggagtccactgccaatgtgaaacaatggaaacagcaacttgctgcctatcaagaggaagcagaacgtctgcacaagcgggtgactgaacttgaatgtgttagtagccaagcaaatgcagtacatactcataagacagaattaaatcagacaatacaagaactggaagagacactgaaactgaaggaagaggaaatagaaaggttaaaacaagaaattgataatgccagagaactacaagaacagagggattctttgactcagaaactacaggaagtagaaattcggaacaaagacctggagggacaactgtctgacttagagcaacgtctggagaaaagtcagaatgaacaagaagcttttcgcaataacctgaagacactcttagaaattctggatggaaagatatttgaactaacagaattacgagataacttggccaagctactagaatgcagctaaggaaagtgaaatttcagtgccaattaattaaaagatacactgtctctcttcataggactgtttaggctctgcatcaagattgcnnnnnnnnnnnnnnnnnnnnnttgaatatcactcctccaggaggaggatcttttgaaattggaattgtatatttcactgtaaattttagaatccagcttgtagctagttggggaaaaaagatgaaaaacttgaactacaaattacctccatgtatattattggccatagttaactagaaagttataaatagacacttaatgcaatcttttttcctgatattagccaatgggagaattaacaatgtctaggtcacatcccctttttgtgttcaacacagtgaagattatctgctttttaaattaatttatttacgatatctagagctgtgttttgtgcaaaaacttagtgatgaaagcctgtcttttgttgtaatctgaataatttctcaggatatttttgcactgctgagaagcagtgccattaccaattaattcttgccaggagtgagagagagctgtatctttaattgaaatatactataactgggtgtatagagttcttcccttttttgtgctggaagatatttcactctggtgactactctggtacactctggtgttctctaatcttgtctgttgtatagtttacttttccatattgattccatgtatttatgagaagatattgtctcccattttattacacattttaaagccaactaacgaaggcagctgagtccctcagaaatttttctttttaagtttctaataaatttgacacacagtactgaaatacagcagcccgtcattgacaggctggtctagcaatgttaagtatatttacagaatatgcagttacatttatttatatattttgcaagaaatcttttctgaatgatcaatgcatttcaatttacgaataataatggttattggggaactgtttattatagataattttaaggtgtatagctattttaaagggggtccatttacatcaaacagccgatcagaggactctatctaaattgtgatcgtggcagatagagatggagtcatgtactctatctggctctacacatcaatcacatcttgattcaaacctcacaaggcaatattctgaattgttaactaggtatttcaaaacaggaattaaattcaataggctcttctcagtgaacaggttttaatgttgttttgatgtaattttaaaagacttttagcaaacatgcatttctttatatgatatatttcttttacgaagctattttaaaagtaagccaagtgctgtctagtctgcttataaagtaggaattgcatcagagtacatatattcttgctgtacaatgcctgtgatgttgaggagggttcttttttaaagtgtatgcttgagtaactgactctatggagtctataaatgcactgacttcttgtttgtaccccaaaatgatcgaattgttaagtacaaaattaagctaattaaccaatttgtaaccattttttcactcataaacagctactcaatactagacaattttgttttttatgtatgtgtatgtacgtaaatacatacatattaatttacattagagtgaaaaataaatggtttgtttctgaagttagtttcttaagtgagttttcaggtgtctctgaaaaatttataacaatcatgtattatatgtgctgtaacatcatgtacgttacctccatctattttaggatattttcctcacctatatattatagggagaataatttagatacacatgctcagagctgagatatttctctgataaatcaggtaacaaaatgtatttgattgatggaattttgaagtaaatgtgtttttatccatcagtttctgagtaacaaagagcaccaagttttaatttaaataggagatttaacactagggatcagggagtttagtatgaagagttaaaaaaatttaaaaaacagtgtaagctgttgaaatggcaagtgaattattttaatgatgtaataaaatatttttaaattttgacatagtgatcatttaatgaaaaaactcaccaaaatgtctccatttgaattgtattgataatgtgggacatatgtgtgattcaatatatacatatacccatatgtatatacagaaaattatttttaatactttcctactgataatgaaatttaaaattggaaattttgtgagtgtttttcttgtccaatagagcctaattgtttccttttttagtgatttaacaatctcttgagggctgcacctttaaattcccagattgtcaatagacatgtacagtatatgggataaggtggacacaagtgcacatataaataaaatcttcttaagacttttaactattcatttacagtaggagagtatgtagaaatcatcatccacaagtcataattaggttgtgtgcctactgtagttttttccatttctgtattatataaacatttgcatattaaaatttgatttttcccagagacaagtattatatactgtatctatatttaaatcaaactgtggtaatatatttctcagaaaataatgttggggactatagcctgaacatgtggacttgaagcgacatggaggaggaggttgatcccattgtgtataagttaatatgtgataactattgaatcttgtacaaaaacaaaaattganaaananaaagaaaagcaaaaatacagtttttattttgaaatacatttgttctctggagaatgtactttatctttttttcctccagtcttttacagatatttaaaagcatttaaatgatgacagcatttacttaaatctttcaggtgctactggattttgcattagtgtgttatgttgtgaaatcctaactttgacataaaaggttttataagtattcccctgcctggaaaattagtttttgttctccnctctctctctttctcttntccactttctttctgcagactaaaacatgctcacgaagttgcatctctccttgtctctatagaagatctccagcaccatcatagatttgatgttctgctgtcattgnactgttgggaagcagttagaggaaaagctcactttttttttcaggtggaaataaaaggaacactcaaaattaagccaacaccaccactacctttaaaaactagtttatttgccctgttaaaattaaatgattcttnaacatgtgggctacagtctcccatgtttttatttaactgaagcatatacacttcggncatttatctcctgtggncctgattttgtcagtactggaatg

SEQ ID NO: 654 - DNA, 182 bp, Homo sapiens
  modified_base (3): a, t, c, g, other or unknown
  modified_base (18): a, t, c, g, other or unknown
  modified_base (39): a, t, c, g, other or unknown
  modified_base (69): a, t, c, g, other or unknown
  modified_base (110): a, t, c, g, other or unknown
  modified_base (164): a, t, c, g, other or unknown
gcnacggttggcgctcgncctggagcctgccctggcgtncccccgcgggcgcagccaagcttcttggcnatggtagataactgcaggggactctggccgcggctaactancctggagatgctgatcgggacccccccgcagaagctacagattctcgttgacantggaagcagtaactttga

SEQ ID NO: 655 - DNA, 2057 bp, Homo sapiens
  modified_base (2006): a, t, c, g, other or unknown
  modified_base (2008): a, t, c, g, other or unknown
cccagccgtctaaacgggaacagccctgggctgagggagctgcagcgcagcagagtatctgacggcgccaggttgcgtaggtgcggcacgaggagttttcccggcagcgaggaggtcctgagcagcatggcccggaggagcgccttccctgccgccgcgctctggctctggagcatcctcctgtgcctgctggcactgcgggcggaggccgggccgccgcaggaggagagcctgtacctatggatcgatgctcaccaggcaagagtactcataggatttgaagaagatatcctgattgtttcagaggggaaaatggcaccttttacacatgatttcagaaaagcgcaacagagaatgccagctattcctgtcaatatccattccatgaattttacctggcaagctgcagggcaggcagaatacttctatgaattcctgtccttgcgctccctggataaaggcatcatggcagatccaaccgtcaatgtccctctgctgggaacagtgcctcacaaggcatcagttgttcaagttggtttcccatgtcttggaaaacaggatggggtggcagcatttgaagtggatgtgattgttatgaattctgaaggcaacaccattctccaaacacctcaaaatgctatcttctttaaaacatgtcaacaagctgagtgcccaggcgggtgccgaaatggaggcttttgtaatgaaagacgcatctgcgagtgtcctgatgggttccacggacctcactgtgagaaagccctttgtaccccacgatgtatgaatggtggactttgtgtgactcctggtttctgcatctgcccacctggattctatggagtgaactgtgacaaagcaaactgctcaaccacctgctttaatggagggacctgtttctaccctggaaaatgtatttgccctccaggactagagggagagcagtgtgaaatcagcaaatgcccacaaccctgtcgaaatggaggtaaatgcattggtaaaagcaaatgtaagtgttccaaaggttaccagggagacctctgttcaaagcctgtctgcgagcctggctgtggtgcacatggaacctgccatgaacccaacaaatgccaatgtcaagaaggttggcatggaagacactgcaataaaaggtacgaagccagcctcatacatgccctgaggccagcaggcgcccagctcaggcagcacacgccttcacttaaaaaggccgaggagcggcgggatccacctgaatccaattacatctggtgaactccgacatctgaaacgttttaagttacaccaagttcatagcctttgttaacctttcatgtgttgaatgttcaaataatgttcattacacttaagaatactggcctgaattttattagcttcattataaatcactgagctgatatttactcttccttttaagttttctaagtacgtctgtagcatgatggtatagattttcttgtttcagtgctttgggacagattttatattatgtcaattgatcaggttaaaattttcagtgtgtagttggcagatattttcaaaattacaatgcatttatggtgtctgggggcaggggaacatcagaaaggttaaattgggcaaaaatgcgtaagtcacaagaatttggatggtgcagttaatgttgaagttacagcatttcagattttattgtcagatatttagatgtttgttacatttttaaaaattgctcttaatttttaaactctcaatacaatatattttgaccttaccattattccagagattcagtattaaaaaaaaaaaaaattacactgtggtagtggcatttaaacaatataatatattctaaacacaatgaaatagggaatataatgtatgaactttttgcattggcttgaagcaatataatatattgtaaacaaaacacagctcttacctaataaacattttatactgtttgtatgtataaaataaaggtgctgctttagttttctgagcattgtgtggaggtnanctttgcacatgctatcttatgaaaataaaattggttgcaatttagtggt

SEQ ID NO: 656 - DNA, 580 bp, Homo sapiens
catcgagtgcgtggtgtgcggagacaagtcgagcggcaagcactacggccagttcacgtgcgagggctgcaagagcttcttcaagcgcagcgtgcggaggaacctgagctacacgtgccgcgccaaccggaactgtcccatcgaccagcaccatcgcaaccagtgccagtactgccgcctcaaaaagtgcctcaaagtgggcatgagacgggaaggtatcggcctctcatttctccttccctcgtcctgggtcccggggtcctgggtacgtttggctagcctgctctgggtaaggacaagaagccccaagctcttctcttcgtattgcagcggaaaagggttttatactagaagcgagttctgcattggaacccagaccccaaatccgcatgctttggccgactgatttccttctttactctctctttgggctgtttccatttcctttgcattgattgtgagttcactggagtctgcctttctgcaagggatggggtgtttgttgttgtcgttttaaagcctagtttacttctctctctctgcccttgtttttcctgcatgttcaacatgtcccaccccc

SEQ ID NO: 657 - DNA, 228 bp, Homo sapiens
ggcaagatctggaagctggccgactgcgactgcgacggcatgcttgatgaggaggagttcgcgctggccaagcacctcatcaagatcaagctcgacggctacgagctgcccagcagcctgcccccccacctcgtgcccccctcgcacaggaagtccctgcccaaggccgactgaggggtgggctgcagaacggggtgggaatgggggacctgggcctcaggcctgctc

SEQ ID NO: 658 - DNA, 2040 bp, Homo sapiens
ggagcgcttggtgacgatcccacgtacgcttggtgactggtggaggtcccagagaaggaccgtgcgtgcaaaaggcgaacctcggtgtgcggtgtgtccacgtgtgcaagctggggaggggagggggcgcagaaggcgtgagtgtgcgcgcgcccgcatgcgggggcgtggcagtcaacagcaacaacccacacgccggcagggccagaaactcccatctccctcaccagccggaaagtacgagtcggctcagcctggagggacccaaccagagcctggcctgggagccaggatggccatccacaaagccttggtgatgtgcctgggactgcctctcttcctgttcccaggggcctgggcccagggccatgtcccacccggctgcagccaaggcctcaaccccctgtactacaacctgtgtgaccgctctggggcgtggggcatcgtcctggaggccgtggctggggcgggcattgtcaccacgtttgtgctcaccatcatcctggtggccagcctcccctttgtgcaggacaccaagaaacggagcctgctggggacccaggtattcttccttctggggaccctgggcctcttctgcctcgtgtttgcctgtgtggtgaagcccgacttctccacctgtgcctctcggcgcttcctctttggggttctgttcgccatctgcttctcttgtctggcggctcacgtctttgccctcaacttcctggcccggaagaaccacgggccccggggctgggtgatcttcactgtggctctgctgctgaccctggtagaggtcatcatcaatacagagtggctgatcatcaccctggttcggggcagtggcgagggcggccctcagggcaacagcagcgcaggctgggccgtggcctccccctgtgccatcgccaacatggactttgtcatggcactcatctacgtcatgctgctgctgctgggtgccttcctgggggcctggcccgccctgtgtggccgctacaagcgctggcgtaagcatggggtctttgtgctcctcaccacagccacctccgttgccatatgggtggtgtggatcgtcatgtatacttacggcaacaagcagcacaacagtcccacctgggatgaccccacgctggccatcgccctcgccgccaatgcctgggccttcgtcctcttctacgtcatccccgaggtctcccaggtgaccaagtccagcccagagcaaagctaccagggggacatgtaccccacccggggcgtgggctatgagaccatcctgaaagagcagaagggtcagagcatgttcgtggagaacaaggccttttccatggatgagccggttgcagctaagaggccggtgtcaccatacagcgggtacaatgggcagctgctgaccagtgtgtaccagcccactgagatggccctgatgcacaaagttccgtccgaaggagcttacgacatcatcctcccacgggccaccgccaacagccaggtgatgggcagtgccaactcgaccctgcgggctgaagacatgtactcggcccagagccaccaggcggccacaccgccgaaagacggcaagaactctcaggtctttagaaacccctacgtgtgggactgagtcagcggtggcgaggagaggcggtcggatttggggagggccctgaggacctggccccgggcaagggactctccaggctcctcctccccctggcaggcccagcaacatgtgccccagatgtggaagggcctccctctctgccagtgtttgggtgggtgtcatgggtgtccccacccactcctcagtgtttgtggagtcgaggagccaaccccagcctcctgccaggatcacctcggcggtcacactccagccaaatagtgttctcggggtggtggctgggcagcgcctatgtttctctggagattcctgcaacctcaagagacttcccaggcgctcaggcctggatcttgctcctctgtgaggaacaagggtgcctaataaatacatttctgctttattaaaagaaaaacaaaaaaaagggg

SEQ ID NO: 659 - DNA, 2252 bp, Homo sapiens
  modified_base (2242): a, t, c, g, other or unknown
gccggaggggacagtggtaggtggggaggttgagtgcaaagggttcaggctgtaagtcatgttgggttggaatgggggcacaggaaggtggggctgttggggagccacgctaagccgggtgtctgtagcagagccagagaaccgggacactgaagagggtgctgaagggggcgactctcagggatcgagccagggcccccgaaggtgggatcgaccagggtaggagacaggaaaaaaaaggagagcagcgggtgggggcgaaagcagggccgaggagagagcactttggacagaacccggcggggaaagggcggcgccgaggcttgtcaggggcgccccgcagcgtcccaggcgcacctgttgggaagaaaggaaggggcttcccggtgttcgagggaaatccagtccggaggggctgactcggagcttgggactcctggggagccaccgcctcctccccagcggcggtcaaaaccgggcaagcgaaggggcgtgaccctggtgctcaggtttcttcctcctcacctgggcaaggaggggtgggggccacgacttccggttcaggtgagtgtcccttcggtgacgtcaggtcatcctcggccgcccctccggtcccgcctccccctcccgcgctcccggggcgcgcgggccgcgcccccgacgccctacatatactcaggtgcgccccacctgtccgcccgcacctgctggctcacctccgagccacctctgctgcgcaccgcagcctcggacctacagcccaggatactttgggacttgccggcgctcagaaacgcgcccagacggcccctccaccttttgtttgcctagggtcgccgagagcgcccggagggaaccgcctggccttcggggaccaccaattttgtctggaaccaccctcccggcgtatcctactccctgtgccgcgaggccatcgcttcactggaggggtcgatttgtgtgtagtttggtgacaagatttgcattcacctggcccaaaccctttttgtctctttgggtgaccggaaaactccacctcaagttttcttttgtggggctgccccccaagtgtcgtttgttttactgtagggtctccccgcccggcgcccccagtgttttctgagggcggaaatggccaattcgggcctgcagttgctgggcttctccatgggccctgctgggctgggtgggtctggtggcctgcaccgccatcccgcagtggcagatgagctcctatgcgggtgacaacatcatcacggcccaggccatgtacaaggggctgtggatggactgcgtcacgcagagcacggggatgatgagctgcaaaatgtacgactcggtgctcgccctgtccgcggccttgcaggccactcgagccctaatggtggtctccctggtgctgggcttcctggccatgtttgtggccacgatgggcatgaagtgcacgcgctgtgggggagacgacaaagtgaagaaggcccgtatagccatgggtggaggcataattttcatcgtggcaggtcttgccgccttggtagcttgctcctggtatggccatcagattgtcacagacttttataaccctttgatccctaccaacattaagtatgagtttggccctgccatctttattggctgggcagggtctgccctagtcatcctgggaggtgcactgctctcctgttcctgtcctgggaatgagagcaaggctgggtaccgtgtaccccgctcttaccctaagtccaactcttccaaggagtatgtgtgacctgggatctccttgccccagcctgacaggctatgggagtgtctagatgcctgaaagggcctggggctgagctcagcctgtgggcagggtgccggacaaaggcctcctggtcactctgtccctgcactccatgtatagtcctcttgggttgggggtgggggggtgccgttggtgggagagacaaaaagagggagagtgtgctttttgtacagtaataaaaaataagtattgggaagcaggcttttttcccttcagggcctctgctttcctcccgtccagatccttgcagggagcttggaaccttagtgcacctacttcagttcagaacacttagcaccccactgactccactgacaattgactaaaagatgcaggtgctcgtatctcgacattcattcccacccccctcttatttaaatagctaccaaagtacttcttttttaataaaaaaataaagatttttattaggtaaanaaaaaaaaaa

SEQ ID NO: 660 - DNA, 3207 bp, Homo sapiens
gacgcgtggggccaggaataactagagaggaacaatggggttattcagaggttttgttttcctcttagttctgtgcctgctgcaccagtcaaatacttccttcattaagctgaataataatggctttgaagatattgtcattgttatagatcctagtgtgccagaagatgaaaaaataattgaacaaatagaggatatggtgactacagcttctacgtacctgtttgaagccacagaaaaaagattttttttcaaaaatgtatctatattaattcctgagaattggaaggaaaatcctcagtacaaaaggccaaaacatgaaaaccataaacatgctgatgttatagttgcaccacctacactcccaggtagagatgaaccatacaccaagcagttcacagaatgtggagagaaaggcgaatacattcacttcacccctgaccttctacttggaaaaaaaacaaaatgaatatggaccaccaggcaaactgtttgtccatgagtgggctcacctccggtggggagtgtttgatgagtacaatgaagatcagcctttctaccgtgctaagtcaaaaaaaatcgaagcaacaaggtgttccgcaggtatctctggtagaaatagagtttataagtgtcaaggaggcagctgtcttagtagagcatgcagaattgattctacaacaaaactgtatggaaaagattgtcaattctttcctgataaagtacaaacagaaaaagcatccataatgtttatgcaaagtattgattctgttgttgaattttgtaacgaaaaaacccataatcaagaagctccaagcctacaaaacataaagtgcaattttagaagtacatgggaggtgattagcaattctgaggattttaaaaacaccatacccatggtgacaccacctcctccacctgtcttctcattgctgaagatcagtcaaagaattgtgtgcttagttcttgataagtctggaagcatggggggtaaggaccgcctaaatcgaatgaatcaagcagcaaaacatttcctgctgcagactgttgaaaatggatcctgggtggggatggttcactttgatagtactgccactattgtaaataagctaatccaaataaaaagcagtgatgaaagaaacacactcatggcaggattacctacatatcctctgggaggaacttccatctgctctggaattaaatatgcatttcaggtgattggagagctacattcccaactcgatggatccgaagtactgctgctgactgatggggaggataacactgcaagttcttgtattgatgaagtgaaacaaagtggggccattgttcattttattgctttgggaagagctgctgatgaagcagtaatagagatgagcaagataacaggaggaagtcatttttatgtttcagatgaagctcagaacaatggcctcattgatgcttttggggctcttacatcaggaaatactgatctctcccagaagtcccttcagctcgaaagtaagggattaacactgaatagtaatgcctggatgaacgacactgtcataattgatagtacagtgggaaaggacacgttctttctcatcacatggaacagtctgcctcccagtatttctctctgggatcccagtggaacaataatggaaaatttcacagtggatgcaacttccaaaatggcctatctcagtattccaggaactgcaaaggtgggcacttgggcatacaatcttcaagccaaagcgaacccagaaacattaactattacagtaacttctcgagcagcaaattcttctgtgcctccaatcacagtgaatgctaaaatgaataaggacgtaaacagtttccccagcccaatgattgtttacgcagaaattctacaaggatatgtacctgttcttggagccaatgtgactgctttcattgaatcacagaatggacatacagaagttttggaacttttggataatggtgcaggcgctgattctttcaagaatgatggagtctactccaggtattttacagcatatacagaaaatggcagatatagcttaaaagttcgggctcatggaggagcaaacactgccaggctaaaattacggcctccactgaatagagccgcgtacataccaggctgggtagtgaacggggaaattgaagcaaacccgccaagacctgaaattgatgaggatactcagaccaccttggaggatttcagccgaacagcatccggaggtgcatttgtggtatcacaagtcccaagccttcccttgcctgaccaatacccaccaagtcaaatcacagaccttgatgccacagttcatgaggataagattattcttacatggacagcaccaggagataattttgatgttggaaaagttcaacgttatatcataagaataagtgcaagtattcttgatctaagagacagttttgatgatgctcttcaagtaaatactactgatctgtcaccaaaggaggccaactccaaggaaagctttgcatttaaaccagaaaatatctcagaagaaaatgcaacccacatatttattgccattaaaagtatagataaaagcaatttgacatcaaaagtatccaacattgcacaagtaactttgtttatccctcaagcaaatcctgatgacattgatcctacacctacttcctactcctactcctactcctgataaaagtcataattctggagttaatatttctacgctggtattgtctgtgattgggtctgttgtaattgttaactttattttaagtaccaccatttgaaccttaacgaagaaaaaaatcttcaagtagacctagaagagagttttaaaaaacaaaacaatgtaagtaaaggatatttctgaatcttaaaattcatcccatgtgtgatcataaactcataaaaataattttaagatgtcggaaaaggatactttgattaaataaaaacactcatggatatgtaaaaactgtcaagattaaaatttaatagtttcatttatttgttattttatttgtaagaaatagtgatgaacaaagatcctttttcatactgatacctggttgtatattatttgatgcaacagttttctgaaatgatatttcaaattgcatcaagaaattaaaatcatctatctgagtagtcaaaatacaagtaaaggagagcaaataaacaacatttggaaaaaaatg

SEQ ID NO: 661 - DNA, 246 bp, Homo sapiens
  modified_base (53): a, t, c, g, other or unknown
  modified_base (60): a, t, c, g, other or unknown
cgaaagttgctggtttcatatctgcccaccactgtatcagctaaaacaggcantcagganttgttcaggggttaagaaagggtttgaggtggttgaaaaactgaatggaaaagcttatggctctgtgatgatattagtgaccagcggagatgataagcttcttggcaattgcttacccactgtgctcagcagtggttcaacaattcactccattgccctgggttcatctgcagccccaaatctgga

SEQ ID NO: 662 - DNA, 2517 bp, Homo sapiens
gaaccaccggcagacgcacctccgggccacacccaccaaggctcctgcccctgttgtcctggggtccccagttgttctagggcctcctgtgggccaggcccgagtggctgtggagcactcataccgaaaggcagaagagggtggggaaggggcgactgtcccatctgccgctgccaccaccactgaggtagtgactgaggtggagctgctcctctacaagtgctctgagtgctcccagctcttccagctgccggcggatttcctggagcaccaggccactcacttccctgctcctgtacccgagtctcaggagcctgccttacagcaggaggtgcaggcctcgtcacctgcagaggtgcctgtgtctcagcctgaccccttgccagcttctgaccacagttacgagctgcgcaatggtgaagccattgggcgggatcgccgggggcgcagggcccggaggaacaacagtggagaagcaggcggggcagccacacaggagctcttctgctcagcctgtgaccagctctttctctcaccccaccagctacagcagcacctgcggagtcaccgggagggcgtctttaagtgccccctgtgcagtcgtgtcttccctagcccttccagtctggaccagcaccttggagaccatagcagcgagtcacacttcctgtgtgtagactgtggcctggccttcggcacagaggccctcctcctggcccaccggcgagcccacaccccgaatcctctgcattcatgtccatgtgggaagacctttgtcaaccttaccaagttcctttatcaccggcgtactcatggggtagggggtgtccctctgcccacaacaccagtcccaccagaggaacctgtcattggtttccctgagccagccccagcagagactggagagccagaggcccctgagccccctgtgtctgaggagacctcagcagggcccgctgccccaggcacctaccgctgcctcctgtgcagccgtgaatttggaaaggccttgcagctgacccggcaccaacgttttgtgcatcggctggagcggcgccataaatgcagcatttgtggcaagatgttcaagaagaagtctcacgtgcgtaaccacctgcgcacacacacaggggagcggcccttcccctgccctgactgctccaagcccttcaactcacctgccaacctggcccgccaccggctcacacacacaggagagcggccctaccggtgtggggactgtggcaaggctttcacgcaaagctccacactgaggcagcaccgcttggtgcatgcccagcacttcccctaccgctgccaggaatgtggggtgcgttttcaccgtccttaccgcctgctcatgcaccgctaccatcacacaggtgaatacccctacaagtgtcgcgagtgcccccgctccttcttgctgcgtcggctgctggaggtgcaccagctcgtggtccatgccgggcgccagccccaccgctgcccatcctgtggggctgccttcccctcctcactgcggctccgggagcaccgctgtgcagccgctgctgcccaggccccacggcgctttgagtgtggcacctgtggcaagaaagtgggctcagctgctcgactgcaggcacacgaggcggcccatgcagctgctgggcctggagaggtcctggctaaggagccccctgcccctcgagccccacgggccactcgtgcaccagttgcctctccagcagcccttggaagcactgctacagcatcccctgcggcccctgcccgccgccggggtctagagtgcagcgagtgcaagaagctgttcagcacagagacgtcactgcaggtgcaccggcgcatccacacaggtgagcggccatacccatgtccagactgtggcaaagcgttccgtcagagtacccacctgaaagaccaccggcgcctgcacacaggtgagcggccctttgcctgtgaagtgtgtggcaaggcctttgccatctccatgcgcctggcagaacatcgccgcatccacacaggcgaacgaccctactcctgccctgactgtggcaagagctaccgctccttctccaacctctggaagcaccgcaagacccatcagcagcagcatcaggcagctgtgcggcagcagctggcagaggcggaggctgccgttggcctggccgtcatggagactgctgtggaggcgctacccctggtggaagccattgagatctaccctctggccgaggctgagggggtccagatcagtggctgactctgcccgacttcctctttggcacctccattccctgttgctgaaggccctccagcatccccttaagcatctgtacatactgtgtcccttcctcttcccatccccaccaccttgtaagttctaaattggatttattctctcgtgaggggggtgctctggggtccttgacacacataaaggtgcccccccaccttccacctcttagcactggtgaccccaaaaatgaaaccatcaataaagactgagttgcc

SEQ ID NO: 663 - DNA, 1252 bp, Homo sapiens
gccggacagagcagaagaaccctcttggactggacgatttgggaattcaaaacttgggacaaactgtcagccttgcccctgctgtggaggcagcctcaatgctgaaaatggagcctctgaacagcacgcaccccggcaccgccgcctccagcagccccctggagtcccgtgcggccggtggcggcagcggcaatggcaacgagtacttctacattctggttgtcatgtccttctacggcattttcttgatcggaatcatgctgggctacatgaaatccaagaggcgggagaagaagtccagcctcctgctgctgtacaaagacgaggagcggctctggggggaggccatgaagccgctgcccgtggtgtcgggcctgaggtcggtgcaggtgcccctgatgctgaacatgctgcaggagagcgtggcgcccgcgctgtcctgcaccctctgttccatggaaggggacagcgtgagctccgagtcctcctccccggacgtgcacctcaccattcaggaggagggggcagacgaggagctggaggagacctcggagacgcccctcaacgagagcagcgaagggtcctcggagaacatccatcagaattcctagcacccccgggacccctgcgggtggctcccatcagccagcaaccttagagagaggaaagacagttttcaagtgtctggtttcactttcacagtgcggctgccactttgaagagacccttggtaaacccctgattcggggtggggtgggggactaggctcagccggaaccagcacctccaaggagtccgggaggtgcctgtggtttacacccaccactgaaaaagccgcggagatgcgcagcgcgtacactgactttggggcctgggtgttggggttctgatcagaatttggcgggatgatatgcttgccattttctcactggatgccctgggtagctcctgcagggtctgcctgttcccagggctgccgaatgcttaggacacgctgagagactagttgtgatttgctattttgcctagagctttgtccttctagatctgattggctgtaagtatctctactgtgtacctgtggcattccttcacagtgggttacaagcttctttgggattagagggggattttggatgggagaaagcgtgggagatcgtggaaccccagccccatttgcacactataagaaaaaaagtaacttttaaacctgttaacattggccggggttataagagatgatcttctattt

SEQ ID NO: 664 - DNA, 1250 bp, Homo sapiens
  modified_base (1160): a, t, c, g, other or unknown
ctcagcgtcaggcaagttggcctctctgttgtaaattagtggttaaggttatctattattgccacttttccagcgctaaaggctgttttggaaccagtgttgcttgttccgcgggtgattggctttttttttttggcaaaccagttattcaagtttctggtctttaaaaaactctgtggcggtacggtaaccgaggaggttccagcgcggcggaagtaccccgcgggtgggtgtgtgcgcaaggccagggccagaggggcacgtggcgccgggaggagagagaatgtcttttcgaggcggaggtcgtggaggctttaatcgaggtggtggaggtggccggcttcaaccgaggcggcagcagcaaccacttccgaggtggaggcggcggtggaggcggcggcaatttcagaggcggcggcaggggaggatttggacgagggggtggccgcggaggctttaacaaaggccaagaccaaggacctccagaacgtgtagtcttattaggagagttcctgcatccctgtgaagatgacatagtttgtaaatgtaccacagatgaaaataaggtgccttatttcaatgctcctgtttacttagaaaacaaagaacaaattggaaaagtggatgaaatatttggacaactcagagatttttatttttcagttaagttgtcagaaaacatgaaggcttcatcctttaaaaaactacagaagttttatatagacccatataagctgctgccactgcagaggtttttacctcgacctccaggtgagaaaggacctccaagaggtggtggcaggggaggccgaggaggaggaagaggaggaggtggcagaggtggtggcagaggcggtggttttagaggtggaagaggaggtggaggtgggggcttcagaggaggaagaggtggtggtttcagagggagaggacattaagtgaaacagttgacagacatcaccagttgacttctgcattaacctgcatgatctgtttctactatggattggaaacttgtttcttgaacaagtcttgaagatcttggtcattttatgacaatggatctaaaatgtcagcatcatgcaaagtgcaacggaatagtgaattttgctctaaaagagcatgaacaagtctttctaatgttttgtacagtgcctggnactctgtgggtgctcaataaatggataggagttttcatttgaaggatatttgaatttttaaaataaagtgttttattcccttaaaaaaaa

SEQ ID NO: 665 - DNA, 408 bp, Homo sapiens
  modified_base (17)..(18): a, t, c, g, other or unknown
  modified_base (337): a, t, c, g, other or unknown
  modified_base (383): a, t, c, g, other or unknown
  modified_base (391): a, t, c, g, other or unknown
tgatgcatcctaaaatnntaagcttcaaatctgatttggtatcaccgaggaaaccttgcccccatcactcagcattgcacttagatacagaatgagttagataaacttggcttgtctagagacccatgtcatcttaacctaaagggaaatcttattgcgttatcataaaattgatgatatcttagggtcagaattgccctttttttttattttgaatgggaagttctcactaaaacaatcctgagatttcttaatttcatgggttctttaaatattataaacacagagtcaacataggaatgaaattgtatttgttaaaatacacacattggggggncaagaggcagatgactacttttcggaggtaatgcttgctccctccnaaaaggcnggttttccatccggggg

SEQ ID NO: 666 - DNA, 925 bp, Homo sapiens
gccaccacacccagctgcttaagcacaaactaatttcaaaaccagtcttagaaattatatcctacgcacttgtcaaacggggtcagtttttcttgaaagtaaacctctgctcttcatcacacaatctaaatctgccaccctacctaaggcagggacttaaaatgaggggcaggttttctcagataaaataagcaaacagacgaattggaatatttcgtctcaattcccatgtacaattttcagcctcatatgcaaatcaatatggcaaccatctcttttttctatcagcaagagccatgtgttggtattaagaggctaggttgtagttcccctcttgacaccagaaacaccaggcctactgttttgtttgatagcctagcacagatgtaactcttctaaagggtaacatttactactacacagaaagtcatttttagaatgttcctagtccatccaagaaaggctaaaaaatgttctgtgtgattctggacttaagaagtctttttcactgaattctggccctagatgctcactcaactagtaaccataatgccctgtttttcccaaatgctgaaatggaacatttactgcattggcaatgttttctagtgggattggttacagaaactgtcattcattcttactgtgcaatattacacagccataattaatgatgtagttaaaaacatttgatggcatataatatatatatacattgaatacattgtaagtaagaaaatatacaggttagaaaactgtaggtatagcatattgtaaaaagaaaatatatatacacgcatagcgaaaaatgtcaggaagaatataccaaaatgttaacgattatctttaagtagtatcatcttttttacttcttgtctttctgtttctcctaaaacttctaaaataaaaaggtattatttttcat

SEQ ID NO: 667 - DNA, 16531 bp, Homo sapiens
  modified_base (164): a, t, c, g, other or unknown
  modified_base (262)..(286): a, t, c, g, other or unknown
gcgggcagcagcagccggccgcgggctttctcccgccgaggggcgaggaggagcctctggctccagaagccgattggggaatcacggggagcggcgccccccttcttttgggtcatttctgcaaacggaaaactctgtagcgtttggcaaagttggtgcctgcncgccccttccaggtttgcgctttgactgttttgtttttggcggaactaccaggcaggaagattgcacaagtaaggggcgttttcagtcgggtgtcaannnnnnnnnnnnnnnnnnnnnnnnnaaaatttcggttcgtgtctgcttctccaagctttattttttttttaaaatacatcgcaccaccaaactaacactcgcacacacccccgcggttactccgtgtcaaactcctagaggagcccttggccagctcggggtgcggcggtggcgaccggcaggcgaggaggcccgcgggcagcaggtattgatgtcaagctgaaccatcgtaggaagttgaaagccttagaaagaggacttggtaaagtttttggattatcttgaaactctggcaaaatggccaagtatggagaacatgaagccagtcctgacaatgggcagaacgaattcagtgatatcattaagtccagatctgatgaacacaatgacgtacagaagaaaacctttaccaaatggataaatgctcgattttcaaagagtgggaaaccacccatcaatgatatgttcacagacctcaaagatggaaggaagctattggatcttctagaaggcctcacaggaacatcactgccaaaggaacgtggttccacaagggtacatgccttaaataacgtcaacagagtgctgcaggttttacatcagaacaatgtggaattagtgaatatagggggaactgacattgtggatggaaatcacaaactgactttggggttactttggagcatcattttgcactggcaggtgaaagatgtcatgaaggatgtcatgtcggacctgcagcagacgaacagtgagaagatcctgctcagctgggtgcgtcagaccaccaggccctacagccaagtcaacgtcctcaacttcaccaccagctggacagatggactcgcctttaatgctgtcctccaccgacataaacctgatctcttcagctgggataaagttgtcaaaatgtcaccaattgagagacttgaacatgccttcagcaaggctcaaacttatttgggaattgaaaagctgttagatcctgaagatgttgccgttcagcttcctgacaagaaatccataattatgtatttaacatctttgtttgaggtgctacctcagcaagtcaccatagacgccatccgtgaggtagagacactcccaaggaaatataaaaaagaatgtgaagaagaggcaattaatatacagagtacagcgcctgaggaggagcatgagagtccccgagctgaaactcccagcactgtcactgaggtcgacatggatctggacagctatcagattgcgttggaggaagtgctgacctggttgctttctgctgaggacactttccaggagcaggatgatatttctgatgatgttgaagaagtcaaagaccagtttgcaacccatgaagcttttatgatggaactgactgcacaccagagcagtgtgggcagcgtcctgcaggcaggcaaccaactgataacacaaggaactctgtcagacgaagaagaatttgagattcaggaacagatgaccctgctgaatgctagatgggaggctcttagggtggagagtatggacagacagtcccggctgcacgatgtgctgatggaactgcagaagaagcaactgcagcagctctccgcctggttaacactcacagaggagcgcattcagaagatggaaacttgccccctggatgatgatgtaaaatctctacaaaagctgctagaagaacataaaagtttgcaaagtgatcttgaggctgaacaggtgaaagtaaattcactaactcacatggtggtcattgttgatgaaaacagtggtgagagcgctacagctatcctagaagaccagttacagaaacttggtgagcgctggacagcagtatgccgttggactgaagaacgctggaataggttacaagaaatcaatatattgtggcaggaattattggaagaacagtgcttgttgaaagcttggttaaccgaaaaagaagaggctttaaataaagtccagacaagcaacttcaaagaccaaaaggaactaagtgtcagtgttcgacgtctggctattttgaaggaagacatggaaatgaagcgtcaaacattggatcagctgagtgagattggccaggatgtgggacaattacttgataattccaaggcatctaagaagatcaacagtgactcagaggaactgactcaaagatgggattctttggttcagagactagaagattcctccaaccaggtgactcaggctgtagcaaagctggggatgtctcagattcctcagaaggaccttttggagactgttcgtgtaagagaacaagcaattacaaaaaaatctaagcaggaactgcctcctcctcctcccccaaagaagagacagatccatgtggatattgaagctaagaaaaagtttgatgctataagtgcagagctgttgaactggattttgaaatggaaaactgccattcagaccacagagataaaagagtatatgaagatgcaagacacttccgaaatgaaaaagaagttgaaggcattagaaaaagaacagagagaaagaatccccagagcagatgaattaaaccaaactggacaaatccttgtggagcaaatgggaaaagaaggccttcctactgaagaaataaaaaatgttctggagaaggtttcatcagaatggaagaatgtatctcaacatttggaagatctagaaagaaagattcagctacaggaagatataaatgcttatttcaagcagcttgatgagcttgaaaaggtcatcaagacaaaggaggagtgggtaaaacacacttccatttctgaatcttcccggcagtccttgccaagcttgaaggattcctgtcagcgggaattgacaaatcttcttggccttcaccccaaaattgaaatggctcgtgcaagctgctcggccctgatgtctcagccttctgccccagattttgtccagcggggcttcgatagctttctgggccgctaccaagctgtacaagaggctgtagaggatcgtcaacaacatctagagaatgaactgaagggccaacctggacatgcatatctggaaacattgaaaacactgaaagatgtgctaaatgattcagaaaataaggcccaggtgtctctgaatgtccttaatgatcttgccaaggtggagaaggccctgcaagaaaaaaagacccttgatgaaatccttgagaatcagaaacctgcattacataaacttgcagaagaaacaaaggctctggagaaaaatgttcatcctgatgtagaaaaattatataagcaagaatttgatgatgtgcaaggaaagtggaacaagctaaaggtcttggtttccaaagatctacatttgcttgaggaaattgctctcacactcagagcttttgaggccgattcaacagtcattgagaagtggatggatggcgtgaaagacttcttaatgaaacagcaggctgcccaaggagacgacgcaggtctacagaggcagttagaccagtgctctgcatttgttaatgaaatagaaacaattgaatcatctctgaaaaacatgaaggaaatagagactaatcttcgaagtggtccagttgctggaataaaaacttgggtgcagacaagactaggtgactaccaaactcaactggagaaacttagcaaggagatcgctactcaaaaaagtaggttgtctgaaagtcaagaaaaagctgcgaacctgaagaaagacttggcagagatgcaggaatggatgacccaggccgaggaagaatatttggagcgggattttgagtacaagtcaccagaagagcttgagagtgctgtggaagagatgaagagggcaaaagaggatgtgttgcagaaggaggtgagagtgaagattctcaaggacaacatcaagttattagctgccaaggtgccctctggtggccaggagttgacgtctgagctgaatgttgtgctggagaattaccaacttctttgtaatagaattcgaggaaagtgccacacgctagaggaggtctggtcttgttggattgaactgcttcactatttggatcttgaaactacctggttaaacactttggaagagcggatgaagagcacagaggtcctgcctgagaagacggatgctgtcaacgaagccctggagtctctggaatctgttctgcgccacccggcagataatcgcacccagattcgagagcttggccagactctgattgatggggggatcctggatgatataatcagtgagaaactggaggctttcaacagccgatatgaagatctaagtcacctggcagagagcaagcagatttctttggaaaagcaactccaggtgctgcgggaaactgaccagatgcttcaagtcttgcaagagagcttgggggagctggacaaacagctcaccacatacctgactgacaggatagatgctttccaagttccacaggaagctcagaaaatccaagcagagatctcagcccatgagctaaccctagaggagttgagaagaaatatgcgttctcagcccctgacctccccagagagtaggactgccagaggaggaagtcagatggatgtgctacagaggaaactccgagaggtgtccacaaagttccagcttttccagaagccagctaacttcgagcagcgcatgctggactgcaagcgtgtgctggatggcgtgaaagcagaacttcacgttctggatgtgaaggacgtagaccctgacgtcatacagacgcacctggacaagtgtatgaaactgtataaaactttgagtgaagtcaaacttgaagtggaaactgtgattaaaacaggaagacatattgtccagaaacagcaaacggacaacccaaaagggatggatgagcagctgacttccctgaaggttctttacaatgacctgggcgcacaggtgacagaaggaaaacaggatctggaaagagcatcacagttggcccggaaaatgaagaaagaggctgcttctctctctgaatggctttctgctactgaaactgaattggtacagaagtccacttcagaaggtctgcttggtgacttggatacagaaatttcctgggctaaaaatgttctgaaggatctggaaaagagaaaagctgatttaaataccatcacagagagtagtgctgccctgcaaaacttgattgagggcagtgagcctattttagaagagaggctctgcgtccttaacgctgggtggagccgagttcgtacctggactgaagattggtgcaataccttgatgaaccatcagaaccagctagaaatatttgatgggaacgtggctcacataagtacctggctttatcaagctgaagctctattggatgaaattgaaaagaaaccaacaagtaaacaggaagaaattgtgaagcgtttagtatctgagctggatgatgccaacctccaggttgaaaatgtccgcgatcaagcccttattttgatgaatgcccgtggaagctcaagcagggagcttgtagaaccaaagttagctgagctgaataggaactttgaaaaggtgtctcaacatatcaaaagtgccaaattgctaattgctcaggaaccattataccaatgtttggtcaccactgaaacatttgaaactggtgtgcctttctctgacttggaaaaattagaaaatgacatagaaaatatgttaaaatttgtggaaaaacacttggaatccagtgatgaagatgaaaagatggatgaggagagtgcccagattgaggaagttctacaaagaggagaagaaatgttacatcaacctatggaagataataaaaaagaaaagatccgtttgcaattattacttttgcatactagatacaacaaaattaaggcaatccctattcaacagaggaaaatgggtcaacttgcttctggaattagatcatcacttcttcctacagattatctggttgaaattaacaaaattttactttgcatggatgatgttgaattatcgcttaatgttccagagctcaacactgctatttacgaagacttctcttttcaggaagactctctgaagaatatcaaagaccaactggacaaacttggagagcagattgcagtcattcatgaaaaacagccagatgtcatccttgaagcctctggacctgaagccattcagatcagagatacacttactcagctgaatgcaaaatgggacagaattaatagaatgtacagtgatcggaaaggttgttttgacagggcaatggaagaatggagacagttccattgtgaccttaatgacctcacacagtggataacagaggctgaagaattactggttgatacctgtgctccaggtggcagcctggacttagagaaagccaggatacatcagcaggaacttgaggtgggcatcagcagccaccagcccagttttgcagcactaaaccgaactggggatgggattgtgcagaaactctcccaggcagatggaagcttcttgaaagaaaaactggcaggtttaaaccaacgctgggatgcaattgttgcagaagtgaaggataggcagccaaggctaaaaggagaaagtaagcaggtgatgaagtacaggcatcagctagatgagattatctgttggttaacaaaggctgagcatgctatgcaaaagagatcaaccaccgaattgggagaaaacctgcaagaattaagagacttaactcaagaaatggaagtacatgctgaaaaactcaaatggctgaatagaactgaattggagatgctttcagataaaagtctgagtttacctgaaagggataaaatttcagaaagcttaaggactgtaaatatgacatggaataagatttgcagagaggtgcctaccaccctgaaggaatgcatccaggagcccagttctgtttcacagacaaggattgctgctcatcctaatgtccaaaaggtggtgctagtatcatctgcgtcagatattcctgttcagtctcatcgtacttcggaaatttcaattcctgctgatcttgataaaactataacagaactagccgactggctggtattaatcgaccagatgctgaagtccaacattgtcactgttggggatgtagaagagatcaataagaccgtttcccgaatgaaaattacaaaggctgacttagaacagcgccatcctcagctggattatgtttttacattggcacagaatttgaaaaataaagcttccagttcagatatgagaacagcaattacagaaaaattggaaagggtcaagaaccagtgggatggcacccagcatggcgttgagctaagacagcagcagcttgaggacatgattattgacagtcttcagtgggatgaccatagggaggagactgaagaactgatgagaaaatatgaggctcgactctatattcttcagcaagcccgacgggatccactcaccaaacaaatttctgataaccaaatactgcttcaagaactgggtcctggagatggtatcgtcatggcgttcgataacgtcctgcagaaactcctggaggaatatgggagtgatgacacaaggaatgtgaaagaaaccacagagtacttaaaaacatcatggatcaatctcaaacaaagtattgctgacagacagaacgccttggaggctgagtggaggacggtgcaggcctctcgcagagatctggaaaacttcctgaagtggatccaagaagcagagaccacagtgaatgtgcttgtggatgcctctcatcgggagaatgctcttcaggatagtatcttggccagggaactcaaacagcagatgcaggacatccaggcagaaattgatgcccacaatgacatatttaaaagcattgacggaaacaggcagaagatggtaaaagctttgggaaattctgaagaggctactatgcttcaacatcgactggatgatatgaaccaaagatggaatgacttaaaagcaaaatctgctagcatcagggcccatttggaggccagcgctgagaagtggaacaggttgctgatgtccttagaagaactgatcaaatggctgaatatgaaagatgaagagcttaagaaacaaatgcctattggaggagatgttccagccttacagctccagtatgaccattgtaaggccctgagacgggagttaaaggagaaagaatattctgtcctgaatgctgtcgaccaggcccgagttttcttggctgatcagccaattgaggcccctgaagagccaagaagaaacctacaatcaaaaacagaattaactcctgaggagagagcccaaaagattgccaaagccatgcgcaaacagtcttctgaagtcaaagaaaaatgggaaagtctaaatgctgtaactagcaattggcaaaagcaagtggacaaggcattggagaaactcagagacctgcagggagctatggatgacctggacgctgacatgaaggaggcagagtccgtgcggaatggctggaagcccgtgggagacttactcattgactcgctgcaggatcacattgaaaaaatcatggcatttagagaagaaatgcaccaatcaactttaaagttaaaacggtgaatgatttatccagtcagctgtctccacttgacctgcatccctctctaaagatgtctcgccagctagatgaccttaatatgcgatggaaacttttacaggtttctgtggatgatcgccttaaacagcttcaggaagcccacagagattttggaccatcctctcagcattttctctctacgtcagtccagctgccgtggcaaagatccatttcacataataaagtgccctattacatcaaccatcaaacacagaccacctgttgggaccatcctaaaatgaccgaactctttcaatcccttgctgacctgaataatgtacgtttttctgcctaccgtacagcaatcaaaatccgaagactacaaaaagcactatgtttggatctcttagagttgagtacaacaaatgaaattttcaaacagcacaagttgaaccaaaatgaccagctcctcagtgttccagatgtcatcaactgtctgacaacaacttatgatggacttgagcaaatgcataaggacctggtcaacgttccactctgtgttgatatgtgtctcaattggttgctcaatgtctatgacacgggtcgaactggaaaaattagagtgcagagtctgaagattggattaatgtctctctccaaaggtctcttggaagaaaaatacagatatctctttaaggaagttgcagggccaacagaaatgtgtgaccagaggcagctgggcctgttacttcatgatgccatccagatcccccggcagctaggtgaagtagcagcttttggaggcagtaatattgagcctagtgttcgcagctgcttccaacagaataacaataaaccagaaataagtgtgaaagagtttatagattggatgcatttggaaccacagtccatggtttggctcccagttttacatcgagtggcagcagcggagactgcaaaacatcaggccaaatgcaacatctgtaaagaatgtccaattgtcgggttcaggtatagaagccttaagcattttaactatgatgtctgccagagttgtttcttttcgggtcgaacagcaaaaggtcacaaattacattacccaatggtggaatattgtatacctacaacatctggggaagatgtacgagacttcacaaaggtacttaagaacaagttcaggtcgaagaagtactttgccaaacaccctcgacttggttacctgcctgtccagacagttcttgaaggtgacaacttagagactcctatcacactcatcagtatgtggccagagcactatgacccctcacaatctcctcaactgtttcatgatgacacccattcaagaatagaacaatatgccacacgactggcccagatggaaaggactaatgggtcttttctcactgatagcagctccaccacaggaagtgtggaagacgagcacgccctcatccagcagtattgccaaacactcggaggagagtccccagtgagccagccgcagagcccagctcagatcctgaagtcagtagagagggaagaacgtggagaactggagaggatcattgctgacctggaggaagaacaaagaaatctacaggtggagtatgagcagctgaaggaccagcacctccgaagggggctccctgtcggttcaccgccagagtcgattatatctccccatcacacgtctgaggattcagaacttatagcagaagcaaaactcctcaggcagcacaaaggtcggctggaggctaggatgcagattttagaagatcacaataaacagctggagtctcagctccaccgcctccgacagctgctggagcagcctgaatctgattcccgaatcaatggtgtttccccatgggcttctcctcagcattctgcactgagctactcgcttgatccagatgcctccggcccacagttccaccaggcagcgggagaggacctgctggccccaccgcacgacaccagcacggatctcacggaggtcatggagcagattcacagcacgtttccatcttgctgcccaaatgttcccagcaggccacaggcaatgtgaagtattcatccggccaaccaatgtttcctgacgtacagtgttgcccttttcagcaaatgccaattccaagttccattaaatcagaagctccatggctccttggcccacgatgttgagtgctgactgtgtgttctactgaaagagtaaaacactgactatccaaagagaaatggatattttgtttttataataaccatatattattgttttcttcttccctttctatgcaagtgtaaattaatgaacagagaggtatttggaaatggtaatacatttgtcacggatttgtataatgtatacagcattgggaaagtgggtgggggctttctaatatgataccgtctttttaataactatgacaaagcttacataagaattagaagaccactttacatttttacattccttctgctgttcatattaaccttgcacaattacttcattttttctttgactcttttaccacaatgttttggttatttataatttatcagccatatgtttatcagccatataaccaactagatcccaaatagatccatgtatttgtttccgtgatttggccacattaataaattcataaatttcaatcaaatatcatatatatacacacatatggtttaagctacagccctgtgtatgccgtttaactttatttgacgttgcccacttacttctttgctgaccacttggataaccgtaataaaaatcctataagcctaaatggcatttcttttgggatatttttcctgcattttattccctttttatataagtaggaattaattatttattttatgtcttaatctatttgataaagaagactacattataataatctcaaagatcatattaccaaaggttgcccacttgagcatattttcattttgacacagaaacaaaatttagtacaacctttcctagttcccatgtcttgattttcatcattacatgcacagcagacctttacctattgtgataccagaacacatcattgtctttggttcccttcaaagagaattttattgttgttttgtattttcaagtccttaatagttcttgaaactcctagttgttttcttgttgaaagcagacacacatttagtgcacggcttattttacctttcgggtgaaagatcagatgtttttatacccttcacttgatcaatatatttggaaagaatgtttatcaaaagtctatgtcactgcttctacagaagaatgaaattaatgcttaggtgatggtacctccacctacatctttttgagtgcattcaattatgtattttggtttagcttctgatttaacatttaattgattcagtttaaacatgttacttaattagcaaatgtagaggaaccaaaaaaaggtgaaaataatatgttttgattcaaacctaaagacataaaaacataaagacattttaactttgggttctctttagctgggatctggccagaaggaggcttaaagttagaaattgctattattttagaataggttgggtgggttggggggcaagggtgtctatttgcagcagagatattttgaaaagaagaaaattgttttatataaaaaggaaagccatgaccacctttctacctcagatccatcttcatccattgcattggaaactgctttatgctgctgcagtctgcaaagtctagagcttttatcaggccatgtcatacccaagaaagcacctatttaaagaaaaaacaattccctgagctctcaactccaagttgtagatttggtgtcttccttgttcttactttaaaaagtcatgtgttaattttttttctgcctgtatttgtatgcaaaatgtcctctatctgctattaaagaaaagctacgtaaaacactacattgtaaccttctaagtaataataaataaaaagaaatatattgcagtaacaatgggaagtaagtatgtagttcttttgaaatatgtggtaaagaactaatcacagactatcatctaatctggttacatattgtatttttcatcctgtgattaaaaggcacatgtgtaaaagtccaattagtatgcttttcatttcaaataatccatatagcctccagaaaaatatgcacatgtgtaaaagtccacgttcatttctttcacttccaatataaagtattctgtattttgtataaagtacgtgcaaacacctttctgctaatcgggtccccacattcttttcactacaggtactttacaagtctgccctctgctcaaacactaaccgtgcactgacatcctccttcctagacagccattcatctcccggacttctttctctcagacatcctcctgacctcctgacctcccctgacctgcttcaccactgtgttacctcactggttacttgttacagcaaactgatgcaactactagtctacctggacaacatattaaacaggtatcacctaatagggtggcagcctatcggggtgattcctggcgaatacacagtaaccaaccacatactgacacactcaacccatttgctacagatggacccacactaattgatatgacaatcctttattcactcggcacatttggtttctttgcattttcttccattttacattgcaggtgtggctaccaagagctggataacgagtccctcaaacaaagtttggaattgcgagatatattggggtaccttgattcttgagacagttgaattcttctagttgatcttgttgtattaaaaagtcactctcaactgaagtgaccactgcatttcttttgtaaaaaggtcatttgactggcttttcctcacaactgccacccatgcagtacaaaagcaggaaatcccttttcatgaaaggtgtaagtacaagatgacatttcacatttttttaaaaaaagaatccttcatgggaatatatcctaataatcaattatatggagacagttttatgtacaccaaatttctgcaactttataataatgaaaattagaaacaacctaaatagttaacaacatgggaatggttaaataaactgagttgcatccattaaatggaatataatatagccattaaaattatgtttttgtaaaatttttaatgccataagaaaatgtggcaattttgcaatgaaaaagatctacttataaaactgtttacagtatgactccaattatgtaaaaaaagtatacaatacacatataggcatacatgggggttgctttttaaaggtggttacttctgggttgtgatattatcagtaatcatttttgcttttttatacatttctgtatttttcaagttttctatgatgagtatattattttacaaagactacgaaaattttcctctgatatactggtaattagaatgtacttgggtattttaaatatatgggaacaatattatagtgcttcatcttctatgacttttttggaatacatatcactttggtaataaacttacattccctgttttatacttgttacaacattttaattaaacagttaatattgtgattagagcattgtttgcttcatgacctaaacaaatactggctttgaagtctaggttctatttcctagaagatttaacattagtatccttttaatctttttaagtaaggcatactgcatacatacattacatgcatgctttctaaacaaaagataattccaacttacagttttcctatgtaagggaaaaaatggaattatggtagtttaaaagcagtccatagtctcatccatcacaaacatgctgataggcataaacgtgtttattaagtgaaacgtatcctttaaaaataaaaaagggaagcctgtatataaatgaagttgtggattcaactagccagaatttattctgacttgcaccaaaccacacaaaatcttttaaaagtctagttagtgtagtctaaatggacactccagagtctgttcttgaattccattgcaagagctccaacttcctactttcagaagggatggggatcaagatgagggttgtcacataagctaattttcaatatatatcaagtcttgtggggtccaggaacaaatactgtcattggttagtgtttaagtacatgagttgacttttctcctctctcacaccccaccttgccctggcaattgggtagggggaggctgtttatcctccaagagaggacggctggttcctcatctcagtttccgttctaaaccacagagtggtcattgctgtgaactccagccaagatggtgtgggagaggcgaggaagccgagcggtctgagccttctgtggggccggtggggttctcactgcgctggcagcagaggatctgcctaaaggtggcgctcatttctttgtcgcggtaggagtaaatgatggggttcatggcagagttgaattcagcaaggagaaggaagaatttctcataggccagcacgtcgcactgtggacagcacacgtctagaagtaacaaaaccaatccaggagtccagcagatgataaaggccccaagcacaatgaccacagtcttcagaagactcatcatggtatcccgattccgccggggtccagaactatgccgagacattctcatagtcctctggcgaacatagccaaagatgtgagcatagagaaccaccattaccacaaaggtcaccaagttgaaaatggcccagaagactaagtaagagtcactgtagaggggtgccatgttggaacaattttcaatatcacagatacagttccagcccacactgggtatagcacccataacgatggccatagtccagatgaccacaatgaccaccactacccgccggttgctcatccgtgtgtggagctgcatgcggaaaaccgtaatgtgcctctcgattgcaatagccagtaagttggccacagatgccgtcaggctggtgtcaatgaggccctgacgaaggagccatgtgctaacagtcagtctccgagtattgggtcctgtgttgaacatgagatagaagtaggccaacccagcaaagaagtctgcagcagccagattagccattaggtaataaataggaaaatggaagcggcggttgacatagattgccaccatgaccaataggttggccaacatgatgaagatacaaacagtgattccaagtcccatcaccagcttgctgactgtgttccattctgtggcaagatgctttccacttcggttataaaagaaggcaatggactcgttgtagaagcactgtggttcattcatggctgtgaactggggctgtgaaattacagggatggaagtagagatggcagccatgacagctctgtggttgtaggtggtgaacacgccccagaactacgggagacaaattttcttgtttgctgatcagatcgaagtcatgctaggagaagctgtgtacctgatgctgtaggtgtcagtcctgagaagtcaggtactcagataggtggatggggagcttcataaatcagacgtccacctctgttagttctttcccatcactcacagggagactgaaatccatgctgagtgcccacagacctgggcaggagctgttcccccagcgccggacagctggcaggactccggtggacgccccggcacggggcattttcacgttgtcgctctcctcttcccacttgaaaagctctggaaaacatcgcggggcccgcaaaaccccggaaatgtggc

SEQ ID NO: 668 - DNA, 289 bp, Homo sapiens
  modified_base (146): a, t, c, g, other or unknown
  modified_base (164): a, t, c, g, other or unknown
  modified_base (194): a, t, c, g, other or unknown
  modified_base (203): a, t, c, g, other or unknown
  modified_base (209): a, t, c, g, other or unknown
  modified_base (222): a, t, c, g, other or unknown
gctgcaccgtgagcgccgaggacaaggcggcggccgagcgctctaagatgatcgacaagaacctgcgggaggacggagagaaggcggcgcgggaggtgaagttgctgctgttgggtgctggggagtcagggaagagcaccatcgtnaagcaggttaggtcattnccggggttgttatttccggggggatttccncaatacccngggttntctacagcaacancatccagtccatcatggccattgtcaaagccatgggcaacctgcagatcgactttgccgacccctcc

SEQ ID NO: 669 - DNA, 1711 bp, Homo sapiens
ctctctgcccacctctgcttcctctaggaacacaggagttccagatcacatcgagttcaccatgaattcactcagtgaagccaacaccaagttcatgttcgacctgttccaacagttcagaaaatcaaaagagaacaacatcttctattcccctatcagcatcacatcagcattagggatggtcctcttaggagccaaagacaacactgcacaacagattaagaaggttcttcactttgatcaagtcacagagaacaccacaggaaaagctgcaacatatcatgttgataggtcaggaaatgttcatcaccagtttcaaaagcttctgactgaattcaacaaatccactgatgcatatgagctgaagatcgccaacaagctcttcggagaaaaaacgtatctatttttacaggaatatttagatgccatcaagaaattttaccagaccagtgtggaatctgttgattttgcaaatgctccagaagaaagtcgaaagaagattaactcctgggtggaaagtcaaacgaatgaaaaaattaaaaacctaattcctgaaggtaatattggcagcaataccacattggttcttgtgaacgcaatctatttcaaagggcagtgggagaagaaatttaataaagaagatactaaagaggaaaaattttggccaaacaagaatacatacaagtccatacagatgatgaggcaatacacatcttttcattttgcctcgctggaggatgtacaggccaaggtcctggaaataccatacaaaggcaaagatctaagcatgattgtgttgctgccaaatgaaatcgatggtctccagaagcttgaagagaaactcactgctgagaaattgatggaatggacaagtttgcagaatatgagagagacacgtgtcgatttacacttacctcggttcaaagtggaagagagctatgacctcaaggacacgttgagaaccatgggaatggtggatatcttcaatggggatgcagacctctcaggcatgaccgggagccgcggtctcgtgctatctggagtcctacacaaggcctttgtggaggttacagaggagggagcagaagctgcagctgccaccgctgtagtaggattcggatcatcacctgcttcaactaatgaagagttccattgtaatcaccctttcctattcttcataaggcaaaataagaccaacagcatcctcttctatggcagattctcatccccgtagatgcaattagtctgtcactccatttggaaaatgttcacctgcagatgttctggtaaactgattgctggcaacaacagattctcttggctcatatttcttttctttctcatcttgatgatgatcgtcatcatcaagaatttaatgattaaaatagcatgcctttctctctttctcttaataagcccacatataaatgtactttttcttccagaaaaattctccttgaggaaaaatgtccaaaataagatgaatcacttaataccgtatcttctaaatttgaaatataattctgtttgtgacctgttttaaatgaaccaaaccaaatcatactttttctttgaatttagcaacctagaaacacacatttctttgaatttaggtgatacctaaatccttcttatgtttctaaattttgtgattctataaaacacatcatcaataaaatagtgacataaaatcaaaaaaaaaaaaaaaaaa

SEQ ID NO: 670 - DNA, 541 bp, Homo sapiens
  modified_base (7): a, t, c, g, other or unknown
  modified_base (18): a, t, c, g, other or unknown
  modified_base (65): a, t, c, g, other or unknown
  modified_base (179): a, t, c, g, other or unknown
  modified_base (191): a, t, c, g, other or unknown
  modified_base (350): a, t, c, g, other or unknown
  modified_base (400): a, t, c, g, other or unknown
  modified_base (435): a, t, c, g, other or unknown
  modified_base (531): a, t, c, g, other or unknown
  modified_base (539): a, t, c, g, other or unknown
tttaganacatttgcttncccatcccaaattaactatgcaaattaattgttttgaagatgccatnccaaatgtggaggtgctcatgagcttggaaactcagaagctctaaggtgagcctccagacagggagagtctgcaacatggtgactgagagggtagtagaaattcacttgctatntaactctctctngagatttattcttggaggacagagcaaaagtccactcttcagcagctctccgagggtcattccttcacaacgtatattccgtttccagttctttgcgttccttccttttccttcgacttcaaattcatttggtgttaaccaagttccatcctcattccngaatgcacttcactgaggatcccgtgtttcattttcttcttatataaaanccctttcgcctcaccacaggtcacgggggagcttnggaacagtgaaaatccacagtgtcacttttggggttttcctcttcgggtgaatatttttctgaaatctcctttttgagcttggacagatatcttgntcctttgnct

SEQ ID NO: 671 - DNA, 282 bp, Homo sapiens; identical to SEQ ID NO: 480
  modified_base (231): a, t, c, g, other or unknown
  modified_base (260): a, t, c, g, other or unknown
  modified_base (280): a, t, c, g, other or unknown

SEQ ID NO: 672 - DNA, 457 bp, Homo sapiens
  modified_base (1): a, t, c, g, other or unknown
  modified_base (372): a, t, c, g, other or unknown
  modified_base (392): a, t, c, g, other or unknown
  modified_base (409): a, t, c, g, other or unknown
  modified_base (422): a, t, c, g, other or unknown
  modified_base (442): a, t, c, g, other or unknown
ncgcccaggagtcctcggccagccctgcctgcccaccaggaggatgaaggtctccgtggctgccctctcctgcctcatgcttgttgctgtccttggatcccaggcccagttcacaaatgatgcagagacagagttaatgatgtcaaagcttccactggaaaatccagtagttctgaacagctttcactttgctgctgactgctgcacctcctacatctcacaaagcatcccgtgttcactcatgaaaagttattttgaaacgagcagcgagtgctccaagccagggtgtcatattcctcaccaagaaggggcggcaagtctgtgccaaacccagtgggtccgggagttcaggattggcatggaaaaagcttnaagccctaattcaatattantaattaaaggaggacanaagagggccagcncacccacctccaacacttcntgaggctttggaagg

SEQ ID NO: 673 - DNA, 370 bp, Homo sapiens
ccgcctcctttgccggggtacacctggcccacaagagaccttcagcacctgtcgacttctcaaagatagacccgggcatagcctgaaagcatattgaaaatgacgaaaaaagggaagactctcatgatgtttgtcactgtatcaggaagccctactgagaaggagacagaggaaattacgagcctctgggagggcagccttttcaatgccaactatgacgtccagaggttcattgtgggatcagaccgtgctatcttcatgcttcgcgatgggagctacgcctgggagatcaaggactttttggtcggtcaagacaggtgtgctgatgtaactctggagggccaggtgtaccccggccaaggaggaggaa

SEQ ID NO: 674 - DNA, 1224 bp, Homo sapiens
cgcatctggagaaccagcggttaccatggaggggatcagtatatacacttcagataactacaccgaggaaatgggctcaggggactatgactccatgaaggaaccctgtttccgtgaagaaaatgctaatttcaataaaatcttcctgcccaccatctactccatcatcttcttaactggcattgtgggcaatggattggtcatcctggtcatgggttaccagaagaaactgagaagcatgacggacaagtacaggctgcacctgtcagtggccgacctcctctttgtcacacgcttcccttctgggcagttgatgccgtggcaaactggtactttgggaacttcctatgcaaggcagtccatgtcatctacacagtcaacctctacagcagtgtcctcatcctggccttcatcagtctggaccgctacctggccatcgtccacgccaccaacagtcagaggccaaggaagctgttggctgaaaaggtggtctatgttggcgtctggatccctgccctcctgctgactattcccgacttcatctttgccaacgtcagtgaggcagatgacagatatatctgtgaccgcttctaccccaatgacttgtgggtggttgtgttccagtttcagcacatcatggttggccttatcctgcctggtattgtcatcctgtcctgctattgcattatcatctccaagctgtcacactccaagggccaccagaagcgcaaggccctcaagaccacagtcatcctcatcctggctttcttcgcctgttggctgccttactacattgggatcagcatcgactccttcatcctcctggaaatcatcaagcaagggtgtgagtttgagaacactgtgcacaagtggatttccatcaccgaggccctagctttcttccactgttgtctgaaccccatcctctatgctttccttggagccaaatttaaaacctctgcccagcacgcactcacctctgtgagcagagggtccagcctcaagatcctctccaaaggaaagcgaggtggacattcatctgtttccactgagtctgagtcttcaagttttcactccagctaacacagatgtaaaagactttttttttatacgataaataacttttttttaagttacacatttttcagatataaaagactgaccaatattgtacagtttttattgcttgttggatttttgtcttgtgtttctttagtttttgtg

SEQ ID NO: 675 - DNA, 2613 bp, Homo sapiens
tcttggtctcggctcctggcccagtgctctttcccatgtgtctgaatctgcatcttgggcaggggtccctgggccccactcctggacccccggactgacccccaccccatcttgtgcttagcagattcttcccctggtggccatgggacccaggtcaatgtcacctgcatcgtgaacgtctgtagcagctctgaccacagctcacagtgctcctcccaagccagctccacaatgggagacacagattccagcccctcggagtccccgaaggacgagcaggtccccttctccaaggaggaatgtgcctttcggtcacagctggagacgccagagaccctgctggggagcaccgaagagaagcccctgccccttggagtgcctgatgctgggatgaagcccagttaaccaggccggtgtgggctgtgtcgtagccaaggtgggctgagccctggcaggatgaccctgcgaaggggccctggtccttccaggcccccaccactaggactctgaggctctttctgggccaagttcctctagtgccctccacagccgcagcctccctctgacctgcaggccaagagcagaggcagcgagttggggaaagcctctgctgccatggtgtgtccctctcggaaggctggctgggcatggacgttcggggcatgctggggcaagtccctgactctctgtgacctgccccgcccagctgcacctgccagcctggcttctggagcccttgggttttttgtttgtttgtttgtttgtttgtttgtttctccccctgggctctgcccagctctggcttccagaaaaccccagcatccttttctgcagaggggctttctggagaggagggatgctgcctgagtcacccatgaagacaggacagtgcttcagcctgaggctgagactgcgggatggtcctggggctctgtgtagggaggaggtggcagccctgtagggaacggggtccttcaagttagctcaggaggcttggaaagcatcacctcaggccaggtgcagtggctcacgcctatgatcccagcactttgggaggctgaggcgggtggatcacctgaggttaggagttcgagaccagcctggccaacatggtaaaaccccatctctactaaaaatacagaaattagccgggcgtggtggcgggcacctatagtcccagctactcagaagcctgaggctgggaaatcgtttgaacccgggaagcggaggttgcagggagccgagatcacgccactgcactccagcctgggcgacagagcgagagtctgtctcaaaagaaaaaaaaaaaagcaccgcctccaaatgctaacttgtccttttgtaccatggtgtgaaagtcagatgcccagagggcccaggcaggccaccatattcagtgctgtggcctgggcaagataacgcacttctaactagaaatctgccaattttttaaaaaagtaagtaccactcaggccaacaagccaacgacaaagccaaactctgccagccacatccaaccccccacctgccatttgcaccctccgccttcactccggtgtgcctgcagccccgcgcctccttccttgctgtcctaggccacaccatctcctttcagggaatttcaggaactagagatgactgagtcctcgtagccatctctctactcctacctcagcctagaccctcctcctcccccagaggggtgggttcctcttccccactccccaccttcaattcctgggccccaaacgggctgccctgccactttggtacatggccagtgtgatcccaagtgccagtcttgtgtctgcgtctgtgttgcgtgtcgtgggtgtgtgtagccaaggtcggtaagttgaatggcctgccttgaagccactgaagctgggattcctccccattagagtcagccttccccctcccagggccagggccctgcagaggggaaaccagtgtagccttgcccggattctgggaggaagcaggttgaggggctcctggaaaggctcagtctcaggagcatggggataaaggagaaggcatgaaattgtctagcagagcaggggcagggtgataaattgttgataaattccactggacttgagcttggcagctgaactattggagggtgggagagcccagccattaccatggagacaagaagggttttccaccctggaatcaagatgtcagactggctggctgcagtgacgtgcacctgtactcaggaggctgaggggaggatcactggagcccaggagtttgaggctgcagcgagctatgatcgcgccactacactccagcctgagcaacagagtgagaccctgtctcttaaagaaaaaaaaagtcagactgctgggactggccaggtttctgcccacattggacccacatgaggacatgatggagcgcacctgccccctggtggacagtcctgggagaacctcaggcttccttggcatcacagggcagagccgggaagcgatgaatttggagactctgtggggccttggttcccttgtgtgtgtgtgttgatcccaagacaatgaaagtttgcactgtatgctggacggcattcctgcttatcaataaacctgtttgttttaaaaaaaa

SEQ ID NO: 676 - DNA, 321 bp, Homo sapiens
  modified_base (2)..(3): a, t, c, g, other or unknown
  modified_base (5): a, t, c, g, other or unknown
  modified_base (7): a, t, c, g, other or unknown
  modified_base (129): a, t, c, g, other or unknown
anntnanattccattgaaggtattatttatttgcagctcatcttaagtgacaaaattccatacagaagactataacagaaatcatatttaatatattaaaattaatacttcaaatatctttcacattangatgattatctattgtgtaaatctttcctaggtatgtgtgtctgtttcttgatgtgtaaaccaaaactctgaaatattctcttgatctaactttgacttttaaaaactgacattgtattgaatttacataattctcaatcagaaaaaaaattactgtcagactgcaatgcaagtctgccccaatgaaggccg

SEQ ID NO: 677 - DNA, 447 bp, Homo sapiens
  modified_base (354): a, t, c, g, other or unknown
tgaaagttgaatattttattatttacacatataaagtgagaatgaaaattgggcatggggcaagggcaggaagatgactccagctcagtcggtgatgatgagctcgtccaccccccagtcttcatagctcccatctggcaggtaacggcgaatgatgatggggatctttcgggccttgagttccttcatggcaatgagcagaggatctgtctccccctccagctccaccatcacaggggcacacatcgcaatctggagcgctcgggtgcccagcacgcgggctcgctcgtacttggtcatgtatggtgtggtgattcgcttctggttggcctgcggtcgctccccagaggaggnagtctcgacattctcctggccttcctcttcggcattctccaagtcatctagcccttcatcctcctccacatcatcagagtcgtcgccatcaaa

SEQ ID NO: 678 - DNA, 479 bp, Homo sapiens
tttttggaggagtggcatggagttctttaatttggaaggcaaaaggttacatttaatgaaaggcagaggctggattaataaatgtttgttagaaagttgttctgacacacagtgaactctgggcttttctcctgcataaaaagcagagctagcagtaagtgcaaatctgaagaaaatccatgtgtccaataagctgccatctccagaactcttatccaggaaattcaaagagtgaacattcttttagtctcctactcctcaattaagtaaatgagaatgagtcagccaacaaagttcatgacaacaaggtgcaggatggtgctggcaaagagaaaatcagcaaaggctcgctctggggagatgccttggaaatccgctttgttctgtgggttgatctgtattctcaggcaaaccgctaggatgaaactccccacacaagagatgaagcccgagagaaaagagttgaaggggaaggtccc

SEQ ID NO: 679 - DNA, 370 bp, Homo sapiens
  modified_base (158): a, t, c, g, other or unknown
gcaaaacaacatttattcttttaaaaaatctatatacattgccatacaaagataccacattgaagcagttctcaggaaccttccagtgagccttctcttataattgcccgagcaagatttcgtgccagagaaagtctcagcatttccaccttggtgtnctctatgtcatcatcctggagctgctcggtatcagattctccatgcacaggtcttcttgacgtcaagtcctccagacaccgcatcaactcataagtctgttctgctgagaaaatcacctgtttctgttccaaaaggggcaaggcatctgtcagcagagttcatcccagaaagaccgaaggggcaatccgagacgtcatcaaggacagaagga

SEQ ID NO: 680 - DNA, 609 bp, Homo sapiens
tttttttttggtgtacaagttttattttagaaaaaaagtattaataaaacaatgaatgcttagttcacttaattactatgttcttataaatgaaattaaattggtctcaaaatatatcctcttagagccaatgtatcttctgcaactaaccaaattcattctcagaatcaagaccttttcgacgcttcaatttccttccatattgcagcttcaatttttgaagtatcatattccctcatcatatcaaattcaagccatggactgattccacttctgagcttctttcatttgctgttcagttaaacaaagatcaaatctgattcctttaatattaaaatttggacgttcccagcgtttagaccagggcttaggcttcatttttactttcagctcattaacaggaactttttggttaggctcttgtactactggcttcatattcacatcaaaagtgctatattcaggaagggcatctcgtaagtatagcaagctatcatccagccgtttctctaatttgaccacctgaatctcctggacccgaggattataaagttcaaagcaaatctcgacaccttgtccttcgataacattcctaaggatgaaagtagc

SEQ ID NO: 681 - DNA, 2806 bp, Homo sapiens
ggatccaggactgagatcccagaaccatgaacctggccatcagcatcgctctcctgctaacaggtacccggcatggggcaggactggggctccaggcgccctggcttccttccctccagagaagcagcttctccctcacagtctcagaaaagcgcaggtgacaaagagagggctctttttcatcctgaagtcagccgatccaccgcgctgatattctgacggcctgaggtggtttttggaaacacagtttgctgagccctccttcacactattgaactagaatccccaactgagaacccaggaaccagcatcaactccctaagatctcctgtccttgaaacacattgataggatccaaggctcaagcagagtggggagggaggctggggtctgcaaaggagaagtgggatccctggggtggggaaaggcactcagagagcagaccccggtcccctccctagccaggcccatctctccacttcaggtgggtgggaggcccctgtgccgcaggcccctccagtttgaaggaggcactgctggtgccagtcttgcaggtctcccgagggcagaaggtgaccagcctaacggcctgcctagtggaccagagccttcgtctggactgccgccatgagaataccagcagttcacccatccagtacgagttcagcctgacccgtgagacaaagaagcacgtgctctttggcactgtgggggtgcctgagcacacataccgctcccgaaccaacttcaccagcaaataccacatgaaggtcctctacttatccgccttcactagcaaggacgagggcacctacacgtgtgcactccaccactctggccattccccacccatctcctcccagaacgtcacagtgctcagaggtgagacaagcccctaacaaggtcaagtgagctgggagagccaggctcggggacagcaggcagttcccttggctggactagagaggagaatagccccataacgctctcaccctctcccaactgctgcctggtcaactggggaaccattgccttcggtgtgaatggggtgaagagctcagggccagacaggcagagcagtgtggttccaccagaactgtgggcaaggcctttggcccctaatcttccttctcccagcgggaaacagggatgacaccacctccctcagccagttttcttgtcatgatgtttagtaaggttttcataagatgatatgtgtgcaagagatcagtaatctgcaaatgggaaagatggctggttctgtgagaccaggctgttcctggtcccagctaagacattgcagtacccacctcccaaagggagtacacccttgctttgggcctgtgcctgcctgagtcctgatccgtcttccttcctaccctgcccccggcccccttctctttctgcagacaaactggtcaagtgtgagggcatcagcctgctggctcagaacacctcgtggctgctgctgctcctgctgtccctctccctcctccaggccacggatttcatgtccctgtgactggtggggcccatggaggagacaggaagcctcaagttccagtgcagagatcctacttctctgagtcagctgaccccctccccccaatccctcaaaccttgaggagaagtggggaccccacccctcatcaggagttccagtgctgcatgcgattatctacccacgtccacgcggccacctcaccctctccgcacacctctggctgtctttttgtactttttgttccagagctgcttctgtctggtttatttaggttttatccttccttttctttgagagttcgtgaagagggaagccaggattggggacctgatggagagtgagagcatgtgaggggtagtgggatggtggggtaccagccactggaggggtcatccttgcccatcgggaccagaaacctgggagagacttggatgaggagtggttgggctgtgctgggcctagcacggacatggtctgtcctgacagcactcctcggcaggcatggctggtgcctgaagaccccagatgtgagggcaccaccaagaatttgtggcctaccttgtgagggagagaactgaggatctccagcattctcagccacaaccaaaaaaaaataaaaagggcagccctccttaccactgtggaagtccctcagaggccttggggcatgacccagtgaagatgcaggtttgaccaggaaagcagcgctagtggagggttggagaaggaggtaaaggatgagggttcatcatccctccctgcctaaggaagctaaaagcatggccctgctgcccctccctgcctccacccacagtggagagggctacaaaggaggacaagaccctctcaggctgtcccaagctcccaagagcttccagagctctgacccacagcctccaagtcaggtggggtggagtcccagagctgcacagggtttggcccaagtttctaagggaggcacttcctcccctcgcccatcagtgccagcccctgctggctggtgcctgagcccctcagacagccccctgccccgcaggcctgccttctcagggacttctgcggggcctgaggcaagccatggagtgagacccaggagccggacacttctcaggaaatggcttttcccaacccccagcccccacccggtggttcttcctgttctgtgactgtgtatagtgccaccacagcttatggcatctcattgaggacaaagaaaactgcacaataaaaccaagcctctggaatctgtcctcgtgtccacctggccttcgctcctccagcagtgcctgcctgcccccgctt

SEQ ID NO: 682 - DNA, 467 bp, Homo sapiens
  modified_base (7): a, t, c, g, other or unknown
  modified_base (394): a, t, c, g, other or unknown
  modified_base (401): a, t, c, g, other or unknown
  modified_base (414): a, t, c, g, other or unknown
  modified_base (456): a, t, c, g, other or unknown
taaaaanaaatctttttttatttcaaagattgcttcttatattgaagctcatattaaagcaacagtacaatgttcataaaatataagtgtgatgccgtaacattttcttacatgtcagaatactgatatttatatgtatactaaaataagaactttaaaattgtacaaatagatacattaaaaatgacatagaaatagggcgtctctcactgaaacaagacagttatatctggcacgtattagtttaagatgaaagtagaagcaaaaagatttacaagaatcagcagtaacaagattgatgctcaagagacataattgtacattgtattgtacatacattgtatgggtttaagctggctggaatattatatatttccaagttttaaaaatggcnctaccanatagagtggtccngagtttaaggcgaaattacagctcagaactgttgtcccttcnaattttggtgg

SEQ ID NO: 683 - DNA, 2366 bp, Homo sapiens
ccacgctctgaagacagaattagctaactttcaaaaacatctggaaaaatgaagacttgggtaaaaatcgtatttggagttgccacctctgctgtgcttgccttattggtgatgtgcattgtcttacgcccttcaagagttcataactctgaagaaaatacaatgagagcactcacactgaaggatattttaaatggaacattttcttataaaacattttttccaaactggatttcaggacaagaatatcttcatcaatctgcagataacaatatagtactttataatattgaaacagggcaatcatataccattttgagtaatagaaccatgaaaagtgtgaatgcttcaaattacggcttatcacctgatcggcaatttgtatatctagaaagtgattattcaaagctttggagatactcttacacagcaacatattacatctatgaccttagcaatggagaatttgtaagaggaaatgagcttcctcgtccaattcagtatttatgctggtcgcctgttgggagtaaattagcatatgtctatcaaaacaatatctatttgaaacaaagaccaggagatccaccttttcaaataacatttaatggaagagaaaataaaatatttaatggaatcccagactgggtttatgaagaggaaatgcttgctacaaaatatgctctctggtggtctcctaatggaaaatttttggcatatgcggaatttaatgatacggatataccagttattgcctattcctattatggcgatgaacaatatcctagaacaataaatattccatacccaaaggctggagctaagaatcccgttgttcggatatttattatcgataccacttaccctgcgtatgtaggtccccaggaagtgcctgttccagcaatgatagcctcaagtgattattatttcagttggctcacgtgggttactgatgaacgagtatgtttgcagtggctaaaaagagtccagaatgtttcggtcctgtctatatgtgacttcagggaagactggcagacatgggattgtccaaagacccaggagcatatagaagaaagcagaactggatgggctggtggattctttgtttcaacaccagttttcagctatgatgccatttcgtactacaaaatatttagtgacaaggatggctacaaacatattcactatatcaaagacactgtggaaaatgctattcaaattacaagtggcaagtgggaggccataaatatattcagagtaacacaggattcactgttttattctagcaatgaatttgaagaataccctggaagaagaaacatctacagaattagcattggaagctatcctccaagcaagaagtgtgttacttgccatctaaggaaagaaaggtgccaatattacacagcaagtttcagcgactacgccaagtactatgcacttgtctgctacggcccaggcatccccatttccacccttcatgatggacgcactgatcaagaaattaaaatcctggaagaaaacaaggaattggaaaatgctttgaaaaatatccagctgcctaaagaggaaattaagaaacttgaagtagatgaaattactttatggtacaagatgattcttcctcctcaatttgacagatcaaagaagtatcccttgctaattcaagtgtatggtggtccctgcagtcagagtgtaaggtctgtatttgctgttaattggatatcttatcttgcaagtaaggaagggatggtcattgccttggtggatggtcgaggaacagctttccaaggtgacaaactcctctatgcagtgtatcgaaagctgggtgtttatgaagttgaagaccagattacagctgtcagaaaattcatagaaatgggtttcattgatgaaaaaagaatagccatatggggctggtcctatggaggatacgtttcatcactggcccttgcatctggaactggtcttttcaaatgtggtatagcagtggctccagtctccagctgggaatattacgcgtctgtctacacagagagattcatgggtctcccaacaaaggatgataatcttgagcactataagaattcaactgtgatggcaagagcagaatatttcagaaatgtagactatcttctcatccacggaacagcagatgataatgtgcactttcagaactcagcacagattgctaaagctctggttaatgcacaagtggatttccaggcaatgtggtactctgaccagaaccacggcttatccggcctgtccacgaaccacttatacacccacatgacccacttcctaaagcagtgtttctctttgtcagactaaaaacgatgcagatgcaagcctgtatcagaatctga

SEQ ID NO: 684 - DNA, 437 bp, Homo sapiens
ttttttttaaaaaaaaattaaatatttttattatatacttttaaacatatagaagatagaaaaaaacagtacaatgaacagccatgtccaccagttagattctgtaacattttgccacatacgcctcacatacattttgttaaaccatttgaaacattttaagacactctaacacttcattcctaaatgcttaagtatgcaaattaagacagtcttttataaactacaacacccttctcacagctcataaaattaccaataattatccaatatcattcaaaatctaatccacattcaaattttctcaactgcctcaccaccgtgctggcctcccacccccacctcagtcttttacagatggtttttcaaaatagagtccagtaaaatatttcacattgcatttggttattacataacttttaatcaagaagagttac

SEQ ID NO: 685 - DNA, 1014 bp, Homo sapiens
ccgacccctcccgcgaaggcgtcggcgcggggctggcgtagggcctgcgtcagctgcagcccgccggcgattggggcgcgcgcgcctccttcggtttggggctaattataaagtggctccagcagccgttaagccccgggacggcgaggcaggcgctcagagccccgcagcctggcccgtgaccccgcagagacgctgaggaccgcgacggtgaggccctacgtccgccagcacacccgggcccgcttctccccgacgcccgccctcctcacacttgccttcttctcttccctctagagtcgtgtctgaacccggcttttccaattggcctgctccatccgaacagcgtcaacgtgagtgaatttgcccgaagcttgtctttgctgagcgggtttggggacgtctgcccgccctctttcccttcacatttcattgcatgggttccccaacagcgttccctggttcttctttgtgaccccagtcaatgtcctgcctcccccggctcccgctctctcgcccctggtctgcggcgttctctccggaatcttgccctgggccgcggacgcccaggaaaagagccgggtgccccaggcagcctcgcgttgggggcgaccgcgccatcccgggaaccgcgaggcgatctgagtcgcctccacgtctacctaaaagctgtcggccgggagggcggggccccagaaaggagcattcctgcgggcttttgctcgacgatcccctgctgaggctgtcgcggcgagggtcctgccgagggaccccgttctgcgcccaggcaggctcgaagcacgcgtccctctctcctcgcagtccatggcgcggttcctgacactttgcacttggctgctgttgctcggccccgggctcctggcgaccgtgcgggccgaatgcagccaggattgcgcgacgtgcagctaccgcctagtgcgcccggccgacatcaacttcctggtgagtgttgcgcgcggcgagtgttgcgcaccttgtgagacagagtttccg

SEQ ID NO: 686 - DNA, 424 bp, Homo sapiens
  modified_base (11): a, t, c, g, other or unknown
  modified_base (333): a, t, c, g, other or unknown
  modified_base (355): a, t, c, g, other or unknown
  modified_base (364): a, t, c, g, other or unknown
  modified_base (414): a, t, c, g, other or unknown
aaaattttttntaccgtatttattggttcaaaaactagaatttatagtttcaggcagatttcaaccaaagagtcaccaaattaaatacacagggtagcttgtgaggcatagacacagcccatgtgttttcctctacattgtatattcatttctctttggcgatttgacattatagccattctctggaagtcctaaagcaaactagtattttatgtgccatattaagttaaaatttcttatgtgaggataccactaatactgggttttgatttagggccatccttcttgccggggggtatggacaatggggggcttgtttctatggattaaggnccctacccctggggccaggtgntatgggggnattgttaaaaccatggccattattatggtggggggccaaccccccacccntggaagggga

SEQ ID NO: 687 - DNA, 374 bp, Homo sapiens
ggaggatgtgggccacgcagggctggcggtggcgctggctctgagcgtgctgccgggcaccgggcgctgcggccgggcgactgcgaagtttgtatttcttatctgggaagattttaccaggacctcaaagacagagatgtcacattctcaccagccactattgaaaacgaacttataaagttctgccgggaagcaagaggcaaagagaatcggttgtgctactatatcggggccacagatgatgcagccaccaaaatcatcaatgaggtatcaaagcctctggccccaccacatccctgtgggagaagatctgtgagaagcttaaggaagaaggacagccagatatgtgagcttaagtatggacaagcagatcc

SEQ ID NO: 688 - DNA, 1604 bp, Homo sapiens
  modified_base (1530): a, t, c, g, other or unknown
gggcgtgatttgagccccgtttttattttctgtgagccacgtcctcctcgagggggtcaatctggccaaaaggagtgatgcgcttcgcctggaccgtgctcctgctcgggcctttgcagctctgcgcgctagtgcactgcgcccctcccgccgccggccaacagcagcccccgcgcgagccgccggcggctccgggcgcctggcgccagcagatccaatgggagaacaacgggcaggtgttcagcttgctgagcctgggctcacagtaccagcctcagcgccgccgggacccgggcgccgccgtccctggtgcagccaacgcctccgcccagcagccccgcactccgatcctgctgatccgcgacaaccgcaccgccgcggcgcgaacgcggacggccggctcatctggagtcaccgctggccgccccaggcccaccgcccgtcactggttccaagctggctactcgacatctagagcccgcgaacgtggcgcctcgcgcgcggagaaccagacagcgccgggagaagttcctgcgctcagtaacctgcggccgcccagccgcgtggacggcatggtgggcgacgacccttacaacccctacaagtactctgacgacaacccttattacaactactacgatacttatgaaaggcccagacctgggggcaggtaccggcccggatacggcactggctacttccagtacggtctcccagacctggtggccgacccctactacatccaggcgtccacgtacgtgcagaagatgtccatgtacaacctgagatgcgcggcggaggaaaactgtctggccagtacagcatacagggcagatgtcagagattatgatcacagggtgctgctcagatttccccaaagagtgaaaaaccaagggacatcagatttcttacccagccgaccaagatattcctgggaatggcacagttgtcatcaacattaccacagtatggatgagtttagccactatgacctgcttgatgccaacacccagaggagagtggctgaaggccacaaagcaagtttctgtcttgaagacacatcctgtgactatggctaccacaggcgatttgcatgtactgcacacacacagggattgagtcctggctgttatgatacctatggtgcagacatagactgccagtggattgatattacagatgtaaaacctggaaactatatcctaaaggtcagtgtaaaccccagctacctggttcctgaatctgactataccaacaatgttgtgcgctgtgacattcgctacacaggacatcatgcgtatgcctcaggctgcacaatttcaccgtattagaaggcaaagcaaaactcccaatggataaatcagtgcctggtgttctgaagtgggaaaaaatagactaacttcagtaggatttatgtattttgaaaaagagaacagaaaacaacaaaagaatttttgtttggactgttttcaataacaaagcacataactggattttgaacgcttaagtcaatcattacttggaaatttntaatgtttattatttacatcaactttgtgaattaacacagtgtttcaattctgtaatttcatatttgactcttt

SEQ ID NO: 689 - DNA, 1761 bp, Homo sapiens
ttgccgatccgccgcccgtccacacccgccgccagctcaccatggatgatgatatcgccgcgctcgtcgtcgacaacggctccggcatgtgcaaggccggcttcgcgggcgacgatgccccccgggccgtcttcccctccatcgtggggcgccccaggcaccagggcgtgatggtgggcatgggtcagaaggattcctatgtgggcgacgaggcccagagcaagagaggcatcctcaccctgaagtaccccatcgagcacggcatcgtcaccaactgggacgacatggagaaaatctggcaccacaccttctacaatgagctgcgtgtggctcccgaggagcaccccgtgctgctgaccgaggcccccctgaaccccaaggccaaccgcgagaagatgacccagatcatgtttgagaccttcaacaccccagccatgtacgttgctatccaggctgtgctatccctgtacgcctctggccgtaccactggcatcgtgatggactccggtgacggggtcacccacactgtgcccatctacgaggggtatgccctcccccatgccatcctgcgtctggacctggctggccgggacctgactgactacctcatgaagatcctcaccgagcgcggctacagcttcaccaccacggccgagcgggaaatcgtgcgtgacattaaggagaagctgtgctacgtcgccctggacttcgagcaagagatggccacggctgcttccagctcctccctggagaagagctacgagctgcctgacggccaggtcatcaccattggcaatgagcggttccgctgccctgaggcactcttccagccttccttcctgggcatggagtcctgtggcatccacgaaactaccttcaactccatcatgaagtgtgacgtggacatccgcaaagacctgtacgccaacacagtgctgtctggcggcaccaccatgtaccctggcattgccgacaggatgcagaaggagatcactgccctggcacccagcacaatgaagatcaagatcattgctcctcctgagcgcaagtactccgtgtggatcggcggctccatcctggcctcgctgtccaccttccagcagatgtggatcagcaagcaggagtatgacgagtccggcccctccatcgtccaccgcaaatgcttctaggcggactatgacttagttgcgttacaccctttcttgacaaaacctaacttgcgcagaaaacaagatgagattggcatggctttatttgttttttttgttttgttttggttttttttttttttttggcttgactcaggatttaaaaactggaacggtgaaggtgacagcagtcggttggagcgagcatcccccaaagttcacaatgtggccgaggactttgattgcacattgttgtttttttaatagtcattccaaatatgagatgcattgttacaggaagtcccttgccatcctaaaagccaccccacttctctctaaggagaatggcccagtcctctcccaagtccacacaggggaggtgatagcattgctttcgtgtaaattatgtaatgcaaaatttttttaatcttcgccttaatacttttttattttgttttattttgaatgatgagccttcgtgcccccccttccccctttttgtcccccaacttgagatgtatgaaggcttttggtctccctgggagtgggtggaggcagccagggcttacctgtacactgacttgagaccagttgaataaaagtgcacacctta

SEQ ID NO: 690 - DNA, 436 bp, Homo sapiens
tttcatgctcattgctgtttattgaaacaaaagaatcagaagaagatcagaatgaagacaataataaaaagcagaagcagaagtacaagaagaataaagaaagaaagggaaagaattgtaggaaggaaaaacttgtagaagtagagggtggagagtgcgaagaggtggagtatgatgggcagtccgatcttttccatctgggctttcagacaatgggatatgtcatggaaggcttctttaaacaccagaagaaattcaggataaagctcaaaaagagcaggcaatcgataggggttgaaaatccactcagtaggccacggaaggacttcaagaaggttgatcgttctgtcgctggatgttgtaggtgtcctacgtgaaggcaatcgacatctggatggctgtgtgtctgctctttgtgttcgctgccttgctggag

SEQ ID NO: 691 - DNA, 390 bp, Homo sapiens
tccaaggtcatggcaaaacatctgaagttcatcgccaggactgtgatggtacaggaagggaacgtggaaagcgcatacaggaccctaaacagaatcctcactatggatgggctcattgaggacattaagcatcggcggtattatgagaagccatgccgccgcgacagagggaaagctatgaaaggtgccggcggatctacaacatggaaatggctcgcaagatcaacttcttgatgcgaaagaatcgggcagatccgtggcagggctgctgaggcctgtgggtgggacaccagtgcgaaaccctcatccagttttctctccatctcttttctttgtacaatcccatttcctattaccattctctgcaataaactcaaatcacatgtctgc

SEQ ID NO: 692 - DNA, 256 bp, Homo sapiens
caccttaaaaactaggtttctatttctggttagattctagagcagtggaactcaggagtgatactataccctacccagtcccaccacagcctgcctccttcctcccacagagataacattgtacaaaactgtatttacaagaaaaccaattaaaaattaagggtgtgtgcaaaagtagacaggagagtcaagacatatcaatgcagggatggctttggggaatgggggactcaaggttctacactggaacctgggg

SEQ ID NO: 693 - DNA, 427 bp, Homo sapiens
ttttggttcaaacaatggaacattttattatatcatattacaaagagtcagtgatgggccattccaggattggttaattcagtagttcaccaaagtcatcaaggatccgtctttccatctcccttctctgccaccctcaaggtttaagacggctgttgcagttccagacattatatcaagatgcagtattcacagaaagaggactgttcatttctttaccagaagattctcccatatatcatgtgtctacatctaaaccaatcactactaaggggaaattgacctacaacatttggattagactaatcaaatttaccttctgagttaggcatagagtcaacttctatgagcacatggctgagccaaggataagcattctgccagcaagagaggacataatatgggtgtgggattggagatgggagag

SEQ ID NO: 694 - DNA, 411 bp, Homo sapiens
  modified_base (101): a, t, c, g, other or unknown
  modified_base (115): a, t, c, g, other or unknown
  modified_base (172): a, t, c, g, other or unknown
  modified_base (213): a, t, c, g, other or unknown
  modified_base (229): a, t, c, g, other or unknown
  modified_base (256): a, t, c, g, other or unknown
  modified_base (293): a, t, c, g, other or unknown
  modified_base (302): a, t, c, g, other or unknown
  modified_base (351): a, t, c, g, other or unknown
  modified_base (357): a, t, c, g, other or unknown
  modified_base (402): a, t, c, g, other or unknown
aaatttatcaatgacaaacagacataaaactcaaagtttggctcttctgaggggcaggagaaaaactggtgatgttcttttatacagatgaaacatgggtncagaaattacacgncacttctaaagcaaccagaagagggacacgaaagcaaacctgtacattcactaggantttgcagtcatttcagatttccactaggtaagaaaatacanttttgcgttagttttnccgtgctcgggtgtatgaaaaaaaaancccagccgacatgcagcaacgtctccagcgcttaggnccgtaaaantgttctaagcacagaagtacatgtgggaagatttctctcatcatttttngtaaancaaagcgttctaatattttacagaccaagttagggccagtttttntttttccct

SEQ ID NO: 695 - DNA, 316 bp, Homo sapiens
  modified_base (88): a, t, c, g, other or unknown
  modified_base (91): a, t, c, g, other or unknown
  modified_base (254): a, t, c, g, other or unknown
gcagaagcgaacaacctgagctttcccttggagcccctgagcagggagagggctcacaagcttgaggccatctctcgcctctgcgagnacnaagtacaaggacctaagaagatccgcgagaagcgctcagccagtgcagacaacctgactctgccccggtggtccccagccatcatctcttaactacggaggcccgccggaccacaccatcccttagtttctcctttagtttgagaaaagacagacttggggtnggtttgtttttgttttttctttccttttctttttttacgcatagctcccgtcaaagctgcct

SEQ ID NO: 696 - DNA, 1576 bp, Homo sapiens
tcaccacctacaaccacagagctgtcatggctgccatctctacttccatccctgtaatttcacagccccagttcacagccatgaatgaaccacagtgcttctacaacgagtccattgccttcttttataaccgaagtggaaagcatcttgccacagaatggaacacagtcagcaagctggtgatgggacttggaatcactgtttgtatcttcatcatgttggccaacctattggtcatggtggcaatctatgtcaaccgccgcttccattttcctatttattacctaatggctaatctggctgctgcagacttctttgctgggttggcctacttctatctcatgttcaacacaggacccaatactcggagactgactgttagcacatggctcctgcgtcagggcctcattgacaccagcctgacggcatctgtggccaacttactggctattgcaatcgagaggcacattacggttttccgcatgcagctccacacacggatgagcaaccggcgggtagtggtggtcattgtggtcatctggactatggccatcgttatgggtgctatacccagtgtgggctggaactgtatctgtgatattgaaaattgttccaacatggcacccctctacagtgactcttacttagtcttctgggccattttcaacttggtgacctttgtggtaatggtggttctctatgctcacatctttggctatgttcgccagaggactatgagaatgtctcggcatagttctggaccccggcggaatcgggataccatgatgagtcttctgaagactgtggtcattgtgcttggggcctttatcatctgctggactcctggattggttttgttacttctagacgtgtgctgtccacagtgcgacgtgctggcctatgagaaattcttccttctccttgctgaattcaactctgccatgaaccccatcatttactcctaccgcgacaaagaaatgagcgccacctttaggcagatcctctgctgccagcgcagtgagaaccccaccggccccacagaaagctcagaccgctcggcttcctccctcaaccacaccatcttggctggagttcacagcaatgaccactctgtggtttagaacggaaactgagatgaggaaccagccgtcctctcttggaggataaacagcctccccctacccaattgccagggcaaggtggggtgtgagagaggagaaaagtcaactcatgtacttaaacactaaccaatgacagtatttgttcctggaccccacaagacttgatatatattgaaaattagcttatgtgacaaccctcatcttgatccccatcccttctgaaagtaggaagttggagctcttgcaatggaattcaagaacagactctggagtgtccatttagactacactaactagacttttaaaagattttgtgtggtttggtgcaagtcagaataaattctggctagttgaatccacaacttcatttatatacaggcttcccttttttatttttaaaggatacgtttcacttaataaacacgtttatgcctatcagcaaaaaaaaaaaaaaa

SEQ ID NO: 697 - DNA, 395 bp, Homo sapiens
  modified_base (314): a, t, c, g, other or unknown
  modified_base (350): a, t, c, g, other or unknown
  modified_base (380): a, t, c, g, other or unknown
gcagcaagatggcggcggtctcaatgtcagtggtactgaggcagacgttgtggcggagaagggcagtggctgtagctgccctttccgtttccagggttccgaccaggtcgttgaggacttccacatggagattggcacaggaccagactcaagacacacaactcataacagttgatgaaaaattggatatcactactttaactggcgttccagaagagcatataaaaactagaaaagtcaggatctttgttcctgctcgcaataacatgcagtctggagtaaacaacacaaagaaatggaagatggagtttgantaccagggagcgatgggaaaatcctttgatgggttnggcatcaaccggcttgatcccctttttccnacatgggttctaaac

SEQ ID NO: 698 - DNA, 1185 bp, Homo sapiens
gctcagggcacatgcctcccctccccaggccgcggcccagctgaccctcggggctcccccggcagcggacagggaagggttaaaggcccccggctccctgccccctgccctggggaacccctggccctgtggggacatgaactgtgtttgccgcctggtcctggtcgtgctgagcctgtggccagatacagctgtcgcccctgggccaccacctggcccccctcgagtttccccagaccctcgggccgagctggacagcaccgtgctcctgacccgctctctcctggcggacacgcggcagctggctgcacagctgagggacaaattcccagctgacggggaccacaacctggattccctgcccaccctggccatgagtgcgggggcactgggagctctacagctcccaggtgtgctgacaaggctgcgagcggacctactgtcctacctgcggcacgtgcagtggctgcgccgggcaggtggctcttccctgaagaccctggagcccgagctgggcaccctgcaggcccgactggaccggctgctgcgccggctgcagctcctgatgtcccgcctggccctgccccagccacccccggacccgccggcgcccccgctggcgcccccctcctcagcctgggggggcatcagggccgcccacgccatcctgggggggctgcacctgacacttgactgggccgtgaggggactgctgctgctgaagactcggctgtgacccggggcccaaagccaccaccgtccttccaaagccagatcttatttatttatttatttcagtactgggggcgaaacagccaggtgatccccccgccattatctccccctagttagagacagtccttccgtgaggcctgggggacatctgtgccttatttatacttatttatttcaggagcaggggtgggaggcaggtggactcctgggtccccgaggaggaggggactggggtcccggattcttgggtctccaagaagtctgtccacagacttctgccctggctcttccccatctaggcctgggcaggaacatatattatttatttaagcaattacttttcatgttggggtggggacggaggggaaagggaagcctgggtttttgtacaaaaatgtgagaaacctttgtgagacagagaacagggaattaaatgtgtcatacatatcc

SEQ ID NO: 699 - DNA, 4220 bp, Homo sapiens
  modified_base (1992): a, t, c, g, other or unknown
atgctgctgctgctgctggcgccactcttcctccgccccccgggcgcgggcggggcgcagacccccaacgccacctcagaaggttgccagatcatacacccgccctgggaagggggcatcaggtaccggggcctgactcgggaccaggtgaaggctatcaacttcctgccagtggactatgagattgagtatgtgtgccggggggagcgcgaggtggtggggcccaaggtccgcaagtgcctggccaacggctcctggacagatatggacacacccagccgctgtgtccgaatctgctccaagtcttatttgaccctggaaaatgggaaggttttcctgacgggtggggacctcccagctctggacggagcccgggtggatttccggtgtgaccccgacttccatctggtgggcagctcccggagcatctgtagtcagggccagtggagcacccccaagccccactgccaggtgaatcgaacgccacactcagaacggcgcgcagtgtacatcggggcactgtttcccatgagcgggggctggccagggggccaggcctgccagcccgcggtggagatggcgctggaggacgtgaatagccgcagggacatcctgccggactatgagctcaagctcatccaccacgacagcaagtgtgatccaggccaagccaccaagtacctatatgagctgctctacaacgaccctatcaagatcatccttatgcctggctgcagctctgtctccacgctggtggctgaggctgctaggatgtggaacctcattgtgctttcctatggctccagctcaccagccctgtcaaaccggcagcgtttccccactttcttccgaacgcacccatcagccacactccacaaccctacccgcgtgaaactctttgaaaagtggggctggaagaagattgctaccatccagcagaccactgaggtcttcacttcgactctggacgacctggaggaacgagtgaaggaggctggaattgagattactttccgccagagtttcttctcagatccagctgtgcccgtcaaaaacctgaagcgccaggatgcccgaatcatcgtgggacttttctatgagactgaagcccggaaagttttttgtgaggtgtacaaggagcgtctctttgggaagaagtacgtctggttcctcattgggtggtatgctgacaattggttcaagatctacgacccttctatcaactgcacagtggatgagatgactgaggcggtggagggccacatcacaactgagattgtcatgctgaatcctgccaatacccgcagcatttccaacatgacatcccaggaatttgtggagaaactaaccaagcgactgaaaagacaccctgaggagacaggaggcttccaggaggcaccgctggcctatgatgccatctgggccttggcactggccctgaacaagacatctggaggaggcggccgttctggtgtgcgcctggaggacttcaactacaacaaccagaccattaccgaccaaatctaccgggcaatgaactcttcgtcctttgagggtgtctctggccatgtggtgtttgatgccagcggctctcggatggcatggacgcttatcgagcagcctcagggtggcagctacaagaagattggctactatgacagcaccaaggatgatctttcctggtccaaaacagataaatggattggagggtcccccccagctgaccagaccctggtcatcaagacattccgcttcctgtcacagaaactctttatctccgtctcagttctctccagcctgggcattgtcctagctgttgtctgtctgtcctttaacatctacaactcacatgtccgttatatccagaactcacagcccaacctgaacaacctgactgctgtgggctgctcactggctttagctgctgtcttccccctggggctcgatggttaccacattgggaggaaccagtttcctttcgtctgccaggcncgcctctggctcctgggcctgggctttagtctgggctacggttccatgttcaccaagatttggtgggtccacacgggcttcacaaagaaggaagaaaagaaggagtggaggaagactctggaaccctggaagctgtatgccacagtgggcctgctggtgggcatggatgtcctcactctcgccatctggcagatcgtggaccctctgcaccggaccattgagacatttgccaaggaggaacctaaggaagatattgacgtctctattctgccccagctggagcattgcagctccaggaagatgaatacatggcttggcattttctatggttacaaggggctgctgctgctgctgggaatcttccttgcttatgagaccaagagtgtgtccactgagaagatcaatgatcaccgggctgtgggcatggctatctacaatgtggcagtcctgtgcctcatcactgctcctgtcaccatgattctgtccagccagcaggatgcagcctttgcctttgcctctcttgccatagttttctcctcctatatcactcttgttgtgctctttgtgcccaagatgcgcaggctgatcacccgaggggaatggcagtcggaggcgcaggacaccatgaagacagggtcatcgaccaacaacaacgaggaggagaagtcccggctgttggagaaggagaaccgtgaactggaaaagatcattgctgagaaagaggagcgtgtctctgaactgcgccatcaactccagtctcggcagcagctccgctcccggcgccacccaccgacacccccagaaccctctgggggcctgcccaggggaccccctgagccccccgaccggcttagctgtgatgggagtcgagtgcatttgctttataagtgagggtagggtgagggaggacaggccagtagggggagggaaagggagaggggaagggcaggggactcaggaagcagggggtccccatccccagctgggaagaacatgctatccaatctcatctcttgtaaatacatgtccccctgtgagttctgggctgatttgggtctctcatacctctgggaaacagacctttttctctcttactgcttcatgtaattttgtatcacctcttcacaatttagttcgtacctggcttgaagctgctcactgctcacacgctgcctcctcagcagcctcactgcatctttctcttcccatgcaacaccctcttctagttaccacggcaacccctgcagctcctctgcctttgtgctctgttcctgtccagcaggggtctcccaacaagtgctctttccaccccaaaggggcctctccttttctccactgtcataatctctttccatcttacttgcccttctatactttctcacatgtggctccccctgaattttgcttcctttgggagctcattcttttcgccaaggctcacatgctccttgcctctgctctgtgcactcacgctcagcacacatgcatcctcccctctcctgcgtgtgcccactgaacatgctcatgtgtacacacgcttttcccgtatgctttcttcatgttcagtcacatgtgctctcgggtgccctgcattcacagctacgtgtgcccctctcatggtcatgggtctgcccttgagcgtgtttgggtaggcatgtgcaatttgtctagcatgctgagtcatgtctttcctatttgcacacgtccatgtttatccatgtactttccctgtgtaccctccatgtaccttgtgtactttcttcccttaaatcatggtattcttctgacagagccatatgtaccctaccctgcacattgttatgcacttttccccaattcatgtttggtggggccatccacaccctctccttgtcacagaatctccatttctgctcagattccccccatctccattgcattcatgtactaccctcagtctacactcacaatcatcttctcccaagactgctcccttttgttttgtgtttttttgaggggaattaaggaaaaataagtgggggcaggtttggagagctgcttccagtggatagttgatgagaatcctgaccaaaggaaggcacccttgactgttgggatagacagatggacctatggggtgggaggtggtgtccctttcacactgtggtgtctcttggggaaggatctccccgaatctcaataaaccagtgaacagtgtgactcggaaaaaaaaaaaaaaaaaaaaaaaa

SEQ ID NO: 700 - DNA, 351 bp, Homo sapiens
  modified_base (338): a, t, c, g, other or unknown
actttatgcaaaaaaaaatatacatttatttataggtctcaatacagcaaaatgaaaacgaaaattgagaacattgctcattaggccagcaactttaaaattatttaatttgaaatataaaataggtggtcttcataaaaagatgcatgaaatttaccttaccttatattttatactttaagagtacattttatacaaatcagtaaccaggcttctttcatgtttaacctgaaatgaacgtaactataaatgagtatctttcttttatgtagtagcaaaaagagtcaataatcctttcaagaaagatactatttcatttcctcccaacttgggattcnccataaacacgga

SEQ ID NO: 701 - DNA, 5117 bp, Homo sapiens
agccgcgcctcggccccatggacgccctgtgcggttccggggagctcggctccaagttctgggactccaacctgtctgtgcacacagaaaacccggacctcactccctgcttccagaactccctgctggcctgggtgccctgcatctacctgtgggtcgccctgccctgctacttgctctacctgcggcaccattgtcgtggctacatcatcctctcccacctgtccaagctcaagatggtcctgggtgtcctgctgtggtgcgtctcctgggcggaccttttttactccttccatggcctggtccatggccgggcccctgcccctgttttctttgtcacccccttggtggtgggggtcaccatgctgctggccaccctgctgatacagtatgagcggctgcagggcgtacagtcttcgggggtcctcattatcttctggttcctgtgtgtggtctgcgccatcgtcccattccgctccaagatccttttagccaaggcagagggtgagatctcagaccccttccgcttcaccaccttctacatccactttgccctggtactctctgccctcatcttggcctgcttcagggagaaacctccatttttctccgcaaagaatgtcgaccctaacccctaccctgagaccagcgctggctttctctcccgcctgtttttctggtggttcacaaagatggccatctatggctaccggcatcccctggaggagaaggacctctggtccctaaaggaagaggacagatcccagatggtggtgcagcagctgctggaggcatggaggaagcaggaaaagcagacggcacgacacaaggcttcagcagcacctgggaaaaatgcctccggcgaggacgaggtgctgctgggtgcccggcccaggccccggaagccctccttcctgaaggccctgctggccaccttcggctccagcttcctcatcagtgcctgcttcaagcttatccaggacctgctctccttcatcaatccacagctgctcagcatcctgatcaggtttatctccaaccccatgggcccctcctggtggggcttcctggtggctgggctgatgttcctgtgctccatgatgcagtcgctgatcttacaacactattaccactacatctttgtgactggggtgaagtttcgtactgggatcatgggtgtcatctacaggaaggctctggttatcaccaactcagtcaaacgtgcgtccactgtgggggaaattgtcaacctcatgtcagtggatgcccagcgcttcatggaccttgcccccttcctcaatctgctgtggtcagcacccctgcagatcatcctggcgatctacttcctctggcagaacctaggtccctctgtcctggctggagtcgctttcatggtcttgctgattccactcaacggagctgtggccgtgaagatgcgcgccttccaggtaaagcaaatgaaattgaaggactcgcgcatcaagctgatgagtgagatcctgaacggcatcaaggtgctgaagctgtacgcctgggagcccagcttcctgaagcaggtggagggcatcaggcagggtgagctccagctgctgcgcacggcggcctacctccacaccacaaccaccttcacctggatgtgcagccccttcttggtgaccctgatcaccctctgggtgtacgtgtacgtggacccaaacaatgtgctggacgccgagaaggcctttgtgtctgtgtccttgtttaatatcttaagacttcccctcaacatgctgccccagttaatcagcaacctgactcaggccagtgtgtctctgaaacggatccagcaattcctgagccaagaggaacttgacccccagagtgtggaaagaaagaccatctccccaggctatgccatcaccatacacagtggcaccttcacctgggcccaggacctgccccccactctgcacagcctagacatccaggtcccgaaaggggcactggtggccgtggtggggcctgtgggctgtgggaagtcctccctggtgtctgccctgctgggagagatggagaagctagaaggcaaagtgcacatgaagggctccgtggcctatgtgccccagcaggcatggatccagaactgcactcttcaggaaaacgtgcttttcggcaaagccctgaaccccaagcgctaccagcagactctggaggcctgtgccttgctagctgacctggagatgctgcctggtggggatcagacagagattggagagaagggcattaacctgtctgggggccagcggcagcgggtcagtctggctcgagctgtttacagtgatgccgatattttcttgctggatgacccactgtccgcggtggactctcatgtggccaagcacatctttgaccacgtcatcgggccagaaggcgtgctggcaggcaagacgcgagtgctggtgacgcacggcattagcttcctgccccagacagacttcatcattgtgctagctgatggacaggtgtctgagatgggcccgtacccagccctgctgcagcgcaacggctcctttgccaactttctctgcaactatgcccccgatgaggaccaagggcacctggaggacagctggaccgcgttggaaggtgcagaggataaggaggcactgctgattgaagacacactcagcaaccacacggatctgacagacaatgatccagtcacctatgtggtccagaagcagtttatgagacagctgagtgccctgtcctcagatggggagggacagggtcggcctgtaccccggaggcacctgggtccatcagagaaggtgcaggtgacagaggcgaaggcagatggggcactgacccaggaggagaaagcagccattggcactgtggagctcagtgtgttctgggattatgccaaggccgtggggctctgtaccacgctggccatctgtctcctgtatgtgggtcaaagtgcggctgccattggagccaatgtgtggctcagtgcctggacaaatgatgccatggcagacagtagacagaacaacacttccctgaggctgggcgtctatgctgctttaggaattctgcaagggttcttggtgatgctggcagccatggccatggcagcgggtggcatccaggctgcccgtgtgttgcaccaggcactgctgcacaacaagatacgctcgccacagtccttctttgacaccacaccatcaggccgcatcctgaactgcttctccaaggacatctatgtcgttgatgaggttctggcccctgtcatcctcatgctgctcaattccttcttcaacgccatctccactcttgtggtcatcatggccagcacgccgctcttcactgtggtcatcctgcccctggctgtgctctacaccttagtgcagcgcttctatgcagccacatcacggcaactgaagcggctggaatcagtcagccgctcacctatctactcccacttttcggagacagtgactggtgccagtgtcatccgggcctacaaccgcagccgggattttgagatcatcagtgatactaaggtggatgccaaccagagaagctgctacccctacatcatctccaaccggtggctgagcatcggagtggagttcgtggggaactgcgtggtgctctttgctgcactatttgccgtcatcgggaggagcagcctgaacccggggctggtgggcctttctgtgtcctactccttgcaggtgacatttgctctgaactggatgatacgaatgatgtcagatttggaatctaacatcgtggctgtggagagggtcaaggagtactccaagacagagacagaggcgccctgggtggtggaaggcagccgccctcccgaaggttggcccccacgtggggaggtggagttccggaattattctgtgcgctaccggccgggcctagacctggtgctgagagacctgagtctgcatgtgcacggtggcgagaaggtggggatcgtgggccgcactggggctggcaagtcttccatgaccctttgcctgttccgcatcctggaggcggcaaagggtgaaatccgcattgatggcctcaatgtggcagacatcggcctccatgacgtgcgctctcagctgaccatcatcccgcaggaccccatcctgttctcggggaccctgcgcatgaacctggaccccttcggcagctactcagaggaggacatttggtgggctttggagctgtcccacctgcacacgtttgtgagctcccagccggcaggcctggacttccagtgctcagagggcggggagaatctcagcgtgggccagaggcagctcgtgtgcctggcccgagccctgctccgcaagagccgcatcctggttttagacgaggccacagctgccatcgacctggagactgacaacctcatccaggctaccatccgcacccagtttgatacctgcactgtcctgaccatcgcacaccggcttaacactatcatggactacaccagggtcctggtcctggacaaaggagtagtagctgaatttgattctccagccaacctcattgcagctagaggcatcttctacgggatggccagagatgctggacttgcctaaaatatattcctgagatttcctcctggcctttcctggttttcatcaggaaggaaatgacaccaaatatgtccgcagaatggacttgatagcaaacactgggggcaccttaagattttgcacctgtaaagtgccttacagggtaactgtgctgaatgctttagatgaggaaatgatccccaagtggtgaatgacacgcctaaggtcacagctagtttgagccagttagactagtccccggtctcccgattcccaactgagtgttatttgcacactgcactgttttcaaataacgattttatgaaatgacctctgtcctccctctgatttttcatattttctaaagtttcgtttctgttttttaataaaaagctttttcctcctggaacagaagacagctgctgggtcaggccacccctaggaactcagtcctgtactctggggtgctgcctgaatccattaaaaatgggagtactgatgaaataaaactacatggtcaacagtaaaaaaaaaaaaaaa

SEQ ID NO: 702 - DNA, 461 bp, Homo sapiens
  modified_base (348): a, t, c, g, other or unknown
  modified_base (365): a, t, c, g, other or unknown
  modified_base (371): a, t, c, g, other or unknown
  modified_base (389): a, t, c, g, other or unknown
  modified_base (418): a, t, c, g, other or unknown
  modified_base (455): a, t, c, g, other or unknown
ttgttttttttggttcagcataacttggaacatttgaaagcttttcaacctaaatgtggggaaaaaacaggtaaggcattatttttgcacaaaactagcattcctaatagtgcaaatgaatctgatacctcttaaaatggtgagaggtcatacacttactagattaatttagattttctttctatggcttgacaaattatccctctataaattctactctcacccagaggctgttgctgtaatcaaaaggataactgtaggataaaggtccaaccttctcctggtatccggcaaaagggtttttgctcatatggcaaaaaaaatctaatttttaaattatcctacagnggaatatacaactgggnttcctngggaccctctatttatcnggcggcaacaggtggttcggggcggcggnctttccaatgggggcccctaacccaaaattgggcggncaatct

SEQ ID NO: 703 - DNA, 412 bp, Homo sapiens
  modified_base (357): a, t, c, g, other or unknown
cataacttaagtaaactttattttcaaaatgcttcaggtacaaaagaaaacaatcggcaaagtctaacaataattaacaaaccagctcttgagcggcagagtgctccagggatgagaggggctggggatggaaaggtggttgggagacacaacatttttctagcttcagaaagtcagggagcccagatcacagcctgaacttcatggtattggttacagattctttacaaaggtgtttacctctctcatgaggtcttcttgattggttacttcctcagaaaaatcatcattgacatccaacaccagcactggaatgttcatcagagcctcaaagtggagcctgtcacttgtacacangacctctcaaagatctgtactggcttcctggcctggtaagagttctcaggggaag

SEQ ID NO: 704 - DNA, 313 bp, Homo sapiens
  modified_base (306): a, t, c, g, other or unknown
tttctaccgtccttgtcataactttgtgttggagggaacctgtttcactatggcctcctttgcccaagttgaaacaggggcccatcatcatgtctgtttccagaacagtgccttggtcatcccacatccccggaccccgcctggggacccccaagctgtgtcctatgaaggggtgtgggggtgaggtagtgaaaagggcggtagttggtggtgggacccagaaacggacgccggtgcttgggaggggttcttaaattaatattttaaaaaaagtaactttttttgtattaaattaaaaagaaaatnggggacg

SEQ ID NO: 705 - DNA, 412 bp, Homo sapiens
tactcagtcaccacccagaaattgtccgagttatgaaatagattcattttgagaagttacacattcagtttgtttatgaactagcctgtcttgtttctgcctcttgtaagaaaagagctaggtctttatgctgctaggacaaaatactgtacatgaattggagaataaggaggggtcatccttctccccggtaccggaacaagagaacagttagtacagaaatggctttggcactttaacccttagacattgtcccaaaccttgttacttgagtattgtagcctcaccatgatttttttttaacaccgtatcatctccatactttttatttacaaattatatatacacacaataatacaattccttcattctaaaacaatagtagaccccaaacaggtctacattaagtttc

SEQ ID NO: 706 - DNA, 457 bp, Homo sapiens
tttaacatcagttaaagattttatttgattcattaaagaggaaactggtgaggcatttccaccagctcaaggaagaattttgtaaatgttatatttatggatcagaaataactgaaatgaatgtgcaaatggaggcaaaactggcctcttccacagtggggaagaaagtcaacagaacctccactaggcataatttacatatgtacagactcaatcagcttttaatatagaaagatatttgaacccaaaatctttcattaaggtaaaaaatacaataataatttttaatgaaatcctggaaaattcatacaaataaaattaaaagcctccaatggggtataatccagcaatatcctaggcaaatgcctcctgaagaacaacagcctttttaaaacatcactgtttatcattcaaaattcagacgtctcctatctttggctattttatctcttcaact

SEQ ID NO: 707 - DNA, 334 bp, Homo sapiens
tatctcagaaaagaagacatgcgatatgccctgcgtaaactggatgacaccaaattccgctctcatgagggtgaaacttcctacatccgagtttatcctgagagaagcaccagctatggctactcacggtctcggtctgggtcaaggggccgtgactctccataccaaagcaggggttcccacactacttctctcctttcaggccctactgagacaggtgatgggaattttttctttattttttaggttaactgagctgctttgtgctcagaatctacattccagattgaggatttagtgtcttaggaaatttttttaattttttttttttaaa

SEQ ID NO: 708 - DNA, 5470 bp, Homo sapiens
cccggggtcactcctgctggacctactccgaccccctaggccgggagtgaaggcgggacttgtgcggttaccagcggaaatgcctcggggtcagaagtcgcaggagagatagacagctgctgaaccaatgggaccagcggatggggcggatgttatctaccattggtgaacgttagaaacgaatagcagccaatgaatcagctgggggggcggagcagtgacgtttattgcggagggggccgcttcgaatcggcggcggccagcttggtggcctgggccaatgaacggcctccaacgagcagggccttcaccaatcggcggcctccacgacggggctgggggagggtatataagccgagtaggcgacggtgaggtcgacgccggccaagacagcacagacagattgacctattggggtgtttcgcgagtgtgagagggaagcgccgcggcctgtatttctagacctgcccttcgcctggttcgtggcgccttgtgaccccgggcccctgccgcctgcaagtcgaaattgcgctgtgctcctgtgctacggcctgtggctggactgcctgctgctgcccaactggctggcaagatgaagctctccctggtggccgcgatgctgctgctgctcagcgcggcgcgggccgaggaggaggacaagaaggaggacgtgggcacggtggtcggcatcgacttggggaccacctactcctggtaagtggggttgcggatgagggggacggggcgtggcgctggctggcgtgagaagtgcggtgctgatgtccctctgtcgggtttttgcagcgtcggcgtgttcaagaacggccgcgtggagatcatcgccaacgatcagggcaaccgcatcacgccgtcctatgtcgccttcactcctgaaggggaacgtctgattggcgatgccgccaagaaccagctcacctccaaccccgagaacacggtctttgacgccaagcggctcatcggccgcacgtggaatgacccgtctgtgcagcaggacatcaagttcttgccgttcaaggttcgaccggttttcctcatccagttagagaacgggtgggtggtgggagtatttagagttataagtctctggaaaagtgttgagacaacagttgaaggttatagacatgatgtatgtaataactttaatactattagtatgttacaaaacttaagacagttgctgtcgtactgtctacgatagtttaggaataaaagaccgattaaaactgaactttgtaagacacctatactccctgaagtatttctagtcaatttgcagccccaagggaccaaaataaaccaaattgtggggatggtagtgggtcttttaaactttgagatgtcattgtatctgtgtctgaaaacaataattctttaaaataggtggttgaaaagaaaactaaaccatacattcaagttgatattggaggtgggcaaacaaagacatttgctcctgaagaaatttctgccatggttctcactaaaatgaaagaaaccgctgaggcttatttgggaaagaaggtaaatatttctagaacaatgttaagtattttttgatcattagtattctcggttggctgttatgtatagaagccttcgtgaagggtttcaaaaattttaatcagaatggtattcatgcttgtcacggtttaattattgagtccctttactataagccaaacaaaaatagacttttcatgtattatttaatgcttacaattccaggaacaataaaattttatatgttgtattcatcaataattggcttaaaaactaaagtgatggtttgactgtaattttttttttttgagatggagtcttgctctgttgcccaggctggactgcagtggcacgatctcagctcactgcaacctctgcctcccgggttaagcagctctcctgcctcagcctccaagtaatggaacgacaggcacaccaccacagctggctaatttttttttttttttttaattttcagtagagacagggtttctccacattgccaggctggtcttgaaatcctgccctcaggttgatcctcctgcctagcctcccaaagtgctggattataggcagaagccaccgcctggccagactgtaatttaaataagggttaaactatgtgacaatacacttaattatctttatccttttaggttacccatgcagttgttactgtaccagcctattttaatgatgcccaacgccaagcaaccaaagacgctggaactattgctggcctaaatgttatgaggatcatcaacgagccgtaagtatgaaattcagggatacggcatatttgccaaatagtggaaatgtgaagtactgacaaaacttttccctttttcaatctaatagtacggcagctgctattgcttatggcctggataagagggagggggagaagaacatcctggtgtttgacctgggtggcggaaccttcgatgtgtctcttctcaccattgacaatggtgtcttcgaagttgtggccactaatggagatactcatctgggtggagaagactttgaccagcgtgtcatggaacacttcatcaaactgtacaaaaagaagacgggcaaagatgtcaggaaggacaatagagctgtgcagaaactccggcgcgaggtagaaaaggccaaggccctgtcttctcagcatcaagcaagaattgaaattgagtccttctatgaaggagaagacttttctgagaccctgactcgggccaaatttgaagagctcaacatggtatgttccttgttttctgctttgctaatgagatctccttagactctgaattcaggacattgcatctagatacttagataacagacatcacagtaaccatgtcttttttctaggatctgttccggtctactatgaagcccgtccagaaagtgttggaagattctgatttgaagaagtctgatattgatgaaattgttcttgttggtggctcgactcgaattccaaagattcagcaactggttaaagagttcttcaatggcaaggaaccatcccgtggcataaacccagatgaagctgtagcgtatggtgctgctgtccaggctggtgtgctctctggtgatcaagatacaggtaggtcatcatcgcagcatctttcttagtgattcagtagcttgatggaagagctcggtacccctattgctttagaaaataccagaatatgagcaacaaggtcacacagctagtaaagggtataagtgaagacaagactggggtagtctccaagatcattagcaactgtttaattcactgcctttaaaatgtgtgtgttagaacctaaccaaatgttagagagataaactttacatagctcatagggagaacttgaattaaaagttaaataacttatccttacaggtgacctggtactgcttcatgtatgtccccttacacttggtattgaaactgtaggaggtgtcatgaccaaactgattccaagtaatacagtggtgcctaccaagaactctcagatcttttctacagcttctgataatcaaccaactgttacaatcaaggtctatgaaggtaattaccttaagtttggttaatatcatggctttttttttgagatgaagtcttgctctgttgcccaggctggactgcagtggcacgatctcggctcactgcaaattctgtctcccgggttcaagtgattctcctgcctcagcctccagagtagctggattacagcctgaccaccacacctggctaatttctgtatttttagtagaggatgggctttcaccatgtttcccaggctggtctccaactcctgacctcaggtcatctgcctgcctccaccgtcccgaaagtactgggattatagcgtgagccaccacgccagatctatctatcatggcatattttaaaagaacatgacttaatatgtcctattgaaatggctagggaactaagtaactgctgttttcagatggaggtcttaatttgaataatgttgatattagatatttagcattcttttttttttttttttaatggagtcttgctctgtcgcctaggctggggtgcagtggcatgacttgcaacctctgcctcccgaatagctgggattacaggtgcccaccatcacgcccggctaagttttgtatttttagtagaggcgagtttcgccatgttggccaggctggtcttgaacccctaacctcagtgatcccacggtcaccgacctggcctcccaaaagtactgtacccagccaatgattagcattctcactaataatagcatctgagctggctcctagagtacaagaaaaaggagttcacagtactttaaaatagataaaattcagttgagttagtaacctaactcattgttagtactagttgctgctccttgtagaccaatatgaaattacttttagctcgataaaaccaaaagtgtcactttatgcttcagactgaaatgcggggatctagatgtgctaatgcttgtcagtaacaactaacaagtttttctgtatgtaacttctaggtgaaagacccctgacaaaagacaatcatcttctgggtacatttgatctgactggaattcctcctgctcctcgtggggtcccacagattgaagtcacctttgagatagatgtgaatggtattcttcgagtgacagctgaagacaagggtacagggaacaaaaataagatcacaatcaccaatgaccagaatcgcctgacacctgaagaaatcgaaaggatggttaatgatgctgagaagtttgctgaggaagacaaaaagctgaaggagcgcattgatactagaaatgagttggaaagctatgcctattctctaaagaatcagattggagataaagaaaagctgggaggtaaactttcctctgaagataaggagaccatggaaaaagctgtagaagaaaagattgaatggctggaaagccaccaagatgctgacattgaagacttcaaagctaagaagaaggaactggaagaaattgttcaaccaattatcagcaaactctatggaagtgcaggccctcccccaactggtgaagaggatacagcagaaaaagatgagttgtagacactgatctgctagtgctgtaatattgtaaatactggactcaggaacttttgttaggaaaaaattgaaagaacttaagtctcgaatgtaattggaatcttcacctcagagtggagttgaaactgctatagcctaagcggctgtttactgcttttcattagcagttgctcacatgtctttgggtgggggggagaagaagaattggccatcttaaaaagcgggtaaaaaacctgggttagggtgtgtgttcaccttcaaaatgttctatttaacaactgggtcatgtgcatctggtgtaggaggttttttctaccataagtgacaccaataaatgtttgttatttacactggtctaatgtttgtgagaagctt

SEQ ID NO: 709 - DNA, 2383 bp, Homo sapiens
ggcacgaggctggctgagccatgatgctgctgccagaacccctgcagagggcctggtttcaggagactcagagtcctctgtgaaaaagcccttggagaggcgccccagcagggctgcacttggctcctgtgaggaaggggctcagggtctgggcccctccgcctgggccgggctgggagccaggcgggcggctgggctgcagcaatggaccgtgagctggcccagcccgcgtccgtgctgagcctgcctgtcgtctgtggccatgccatcatgggctcctcggtgtacatcacggtggagctggccattgctgtgctggccatcctgggcaatgtgctggtgtgctgggccgtgtggctcaacagcaacctgcagaacgtcaccaactactttgtggtgtcactggcggcggccgacatcgcagtgggtgtgctcgccatcccctttgccatcaccatcagcaccgggttctgcgctgcctgccacggctgcctcttcattgcctgcttcgtcctggtcctcacgcagagctccatcttcagtctcctggccatcgccattgaccgctacattgccatccgcatcccgctccggtacaatggcttggtgaccggcacgagggctaagggcatcattgccatctgctgggtgctgtcgtttgccatcggcctgactcccatgctaggttggaacaactgcggtcagccaaaggagggcaagaaccactcccagggctgcggggagggccaagtggcctgtctctttgaggatgtggtccccatgaactacatggtgtacttcaacttctttgcctgtgtgctggtgcccctgctgctcatgctgggtgtctatttgcggatcttcctggcggcgcgacgacagctgaagcagatggagagccagcctctgccgggggagcgggcacggtccacactgcagaaggaggtccatgctgccaagtcactggccatcattgtggggctctttgccctctgctggctgcccctacacatcatcaactgcttcactttcttctgccccgactgcagccacgcccctctctggctcatgtacctggccatcgtcctctcccacaccaattcggttgtgaatcccttcatctacgcctaccgtatccgcgagttccgccagaccttccgcaagatcattcgcagccacgtcctgaggcagcaagaacctttcaaggcagctggcaccagtgcccgggtcttggcagctcatggcagtgacggagagcaggtcagcctccgtctcaacggccacccgccaggagtgtgggccaacggcagtgctccccaccctgagcggaggcccaatggctatgccctggggctggtgagtggagggagtgcccaagagtcccaggggaacacgggcctcccagacgtggagctccttagccatgagctcaagggagtgtgcccagagccccctggcctagatgaccccctggcccaggatggagcaggagtgtcctgatgattcatggagtttgccccttcctaagggaaggagatctttatctttctggttggcttgaccagtcacgttgggagaagagagagagtgccaggagaccctgagggcagccggttcctactttggactgagagaagggagccccaggctggagcagcatgaggcccagcaagaagggcttgggttctgaggaagcagatgtttcatgctgtgaggccttgcaccaggtgggggccacagcaccagcagcatctttgctgggcagggcccagccctccactgcagaagcatctggaagcaccaccttgtctccacagagcagcttgggcacagcagactggcctggccctgagactggggagtggctccaacagcctcctgccacccacacaccactctccctagactctcctagggttcaggagctgctgggcccagaggtgacatttgacttttttccaggaaaaatgtaagtgtgaggaaaccctttttattttattacctttcactctctggctgctgggtctgccgtcggtcctgctgctaacctggcaccagagcctctgccggggagcctcaggcagtcctctcctgctgtcacagctgccatccacttctcagtcccagggccatctcttggagtgacaaagctgggatcaaggacagggagttgtaacagagcagtgccagagcatgggcccaggtcccaggggagaggttggggctggcaggccactggcatgtgctgagtagcgcagagctacccagtgagaggccttgtctaactgcctttccttctaaagggaatgtttttttctgagataaaataaaaacgagccacatcgtgttttaagcttgtccaaatgaaaaaaaaaaaaaaaaa

SEQ ID NO: 710 - DNA, 496 bp, Homo sapiens
  modified_base (313): a, t, c, g, other or unknown
  modified_base (385): a, t, c, g, other or unknown
  modified_base (424): a, t, c, g, other or unknown
  modified_base (463): a, t, c, g, other or unknown
  modified_base (476): a, t, c, g, other or unknown
  modified_base (482): a, t, c, g, other or unknown
gaggaacatctctgccaatgagttcttggagtttggcagctaccaaggcaacatgtttggcaccaaatttgaaacagtgcaccagatccataagcagaacaagattgccatccttgacattgagccccagaccctgaaaattgttcggacagcagaactttcgcctttcattgtgttcattgcacctactgaccagggcactcagacagaagccctgcagcagctgcagaaggactctgaggccatccgcagccagtacgctcactactttgacctctcactggtcaataatggtgttgatgaaacccttaangaaattacaagaagccttcgaccaagcgtgcagttctccacagtggggtggctggtctcctggggtttactnaagcctggtaagaattggggggaacccacttggtattgnccctcttccaggattttggaaattccaaccggccttggntttaagagaaaanaagggntggttcccactaat

SEQ ID NO: 711 - DNA, 467 bp, Homo sapiens
ctggccgagtggaagctcttcatctacaacccgaccaccggagaattcctggggcgcaccgcaagagctggggtttgatcttgctcttctacctagttttttatgggttcctggctgcactcttctcattcacgatgtgggttatgcttcagactctcaacgatgaggttccaaaataccgtgaccagattcctagcccaggactcatggtttttccaaaaccagtgaccgcattggaatatacattcagtaggtctgatccaacttcgtatgcagggtacattgaagaccttaagaagtttctaaaaccatatactttagaagaacagaagaacctcacagtctgtcctgatggagcactttttgaacagaagggtccagtttatgttgcatgtcagtttcctatttcattacttcaagcatgcagtggtatgaatgatcctgattttggctattctcaaggaaac

SEQ ID NO: 712 - DNA, 291 bp, Homo sapiens
  modified_base (54)..(55): a, t, c, g, other or unknown
  modified_base (271): a, t, c, g, other or unknown
aactaatattaaatagtaaatttaatgtgtattaatattgtcatataatattgnnattactcatgtaaatgtaaatattacattgaggatatagtaaatattaaatttactatgtcattgaggacagtatttcaaactagcttttttaaaaagaaaaacagaagatggcagtgaatagaacagtgattgttcatactacttggatctactgccttaatttatactaggatgtcaatccaccattgattttggaccatcagtgccaatgtcnacgtagccaaaaaggccaat

SEQ ID NO: 713 - DNA, 1172 bp, Homo sapiens
gagacattcctcaattgcttagacatattctgagcctacagcagaggaacctccagtctcagcaccatgaatcaaactgcgattctgatttgctgccttatctttctgactctaagtggcattcaaggagtacctctctctagaaccgtacgctgtacctgcatcagcattagtaatcaacctgttaatccaaggtctttagaaaaacttgaaattattcctgcaagccaattttgtccacgtgttgagatcattgctacaatgaaaaagaagggtgagaagagatgtctgaatccagaatcgaaggccatcaagaatttactgaaagcagttagcaaggaaatgtctaaaagatctccttaaaaccagaggggagcaaaatcgatgcagtgcttccaaggatggaccacacagaggctgcctctcccatcacttccctacatggagtatatgtcaagccataattgttcttagtttgcagttacactaaaaggtgaccaatgatggtcaccaaatcagctgctactactcctgtaggaaggttaatgttcatcatcctaagctattcagtaataactctaccctggcactataatgtaagctctactgaggtgctatgttcttagtggatgttctgaccctgcttcaaatatttccctcacctttcccatcttccaagggtactaaggaatctttctgctttggggtttatcagaattctcagaatctcaaataactaaaaggtatgcaatcaaatctgctttttaaagaatgctctttacttcatggacttccactgccatcctcccaaggggcccaaattctttcagtggctacctacatacaattccaaacacatacaggaaggtagaaatatctgaaaatgtatgtgtaagtattcttatttaatgaaagactgtacaaagtataagtcttagatgtatatatttcctatattgttttcagtgtacatggaataacatgtaattaagtactatgtatcaatgagtaacaggaaaattttaaaaatacagatagatatatgctctgcatgttacataagataaatgtgctgaatggttttcaaataaaaatgaggtactctcctggaaatattaagaaagactatctaaatgttgaaagatcaaaaggttaataaagtaattataact

SEQ ID NO: 714 - DNA, 382 bp, Homo sapiens
acaaggaagatttgcatgatatgcttgcttctctagggaagaatcccactgatgcataccttgatgccatgatgaatgaggccccagggccattcaatttcaccatgttcctgaccatgtttggtgagaagttaaatggcacagatcctgaagatgtcatcagaaacgcctttgcttgctttgatgaagaagcaacaggcaccattcaggaagattacctaagagagctgctgacaaccatgggggatcggtttacagatgaggaagtggatgagctgtacagagaagcacctattgacaaaaaggggaatttcaattacatcgagttcacacgcatcctgaaacatggagccaaagacaaagatgactgaaagaactttag

SEQ ID NO: 715 - DNA, 2135 bp, Homo sapiens
tcggcttatttgttttccctcctcttaggattgccccctgtgggtcactttctcagtcattttgagctcagcctaatcaaagactgaggttatgaagtcgatcctagatggccttgcagataccaccttccgcaccatcaccactgacctcctgtacgtgggctcaaatgacattcagtacgaagacatcaaaggtgacatggcatccaaattagggtacttcccacagaaattccctttaacttcctttaggggaagtcccttccaagagaagatgactgcgggagacaacccccagctagtcccagcagaccaggtgaacattacagaattttacaacaagtctctctcgtccttcaaggagaatgaggagaacatccagtgtggggagaacttcatggacatagagtgtttcatggtcctgaaccccagccagcagctggccattgcagtcctgtccctcacgctgggcaccttcacggtcctggagaacctcctggtgctgtgcgtcatcctccactcccgcagcctccgctgcaggccttcctaccacttcatcggcagcctggcggtggcagacctcctggggagtgtcatttttgtctacagcttcattgacttccacgtgttccaccgcaaagatagccgcaacgtgtttctgttcaaactgggtggggtcacggcctccttcactgcctccgtgggcagcctgttcctcacagccatcgacaggtacatatccattcacaggcccctggcctataagaggattgtcaccaggcccaaggccgtggtggcgttttgcctgatgtggaccatagccattgtgatcgccgtgctgcctctcctgggctggaactgcgagaaactgcaatctgtttgctcagacattttcccacacattgatgaaacctacctgatgttctggatcggggtcaccagcgtactgcttctgttcatcgtgtatgcgtacatgtatattctctggaaggctcacagccacgccgtccgcatgattcagcgtggcacccagaagagcatcatcatccacacgtctgaggatgggaaggtacaggtgacccggccagaccaagcccgcatggacattaggttagccaagaccctggtcctgatcctggtggtgttgatcatctgctggggccctctgcttgcaatcatggtgtatgatgtctttgggaagatgaacaagctcattaagacggtgtttgcattctgcagtatgctctgcctgctgaactccaccgtgaaccccatcatctatgctctgaggagtaaggacctgcgacacgctttccggagcatgtttccctcttgtgaaggcactgcgcagcctctggataacagcatgggggactcggactgcctgcacaaacacgcaaacaatgcagccagtgttcacagggccgcagaaagctgcatcaagagcacagtcaagattgccaaggtaaccatgtctgtgtccacagacacgtctgccgaggctctgtgagcctgatgcctccctggcagcacaggaaaagaatttttttttttaagctcaaaatctagaagagtctattgtctccttggttatatttttttaactttaccatgctcaatgaaaaggtgattgtcaccatgatcacttatcagtttgctaatgtttccatagtttaggtactcaaactccattctccaggggtttacagtgaagaaagcctgttgtttaagtgactgaacgatccttcaaagtctcaatgaaataggagggaaacctttggctacacaattggaagtctaagaacccatggaaaaatgccatcaaatgaataatgcctttgtaaccacaactttcactataatgtgaaatgtaactgtccgtagtatcagagatgtccatttttacaagttatagtactagagatattttgtaaaatgtattatgtcctgtgagatgtgtatcagtgtttatgtgctattaatatttgtttagttcagccaaactgaaaggtagacttttatgagaacaatggacaagcagtggatacgtgtcaatgtgtgcactttttttctatattattgcccatgatataactttagaaataaaccttaatatttcttcccaaaaaaaaaaa

SEQ ID NO: 716 - DNA, 1216 bp, Homo sapiens
cggagccgggctggcaggagcaggatggcggcggcggcggctgcaggcgaggcgcgccgggtgctggtgtacggcggcaggggcgctctgggttctcgatgcgtgcaggcttttcgggcccgcaactggtgggttgccagcgttgatgtggtggagaatgaagaggccagcgctacgatcattgttaaaatgacagactcgttcactgagcaggctgaccaggtgactgctgaggttggaaagctcttgggtgaagagaaggtggatgcaattctttgcgttgctggaggatgggccgggggcaatgccaaatccaagtctctctttaagaactgtgacctgatgtggaagcagagcatatggacatcgaccatctccagccatctggctaccaagcatctcaaggaaggaggcctcctgaccttggctggcgcaaaggctgccctggatgggactcctggtatgatcgggtacggcatggccaagggtgctgttcaccagctctgccagagcctggctgggaagaacagcggcatgccgcccggggcagccgccatcgctgtgctcccggttaccctggataccccgatgaacaggaaatcaatgcctgaggctgacttcagctcctggacacccttagaattcctagttgaaactttccatgactggatcacagggaaaaaccgaccgagctcaggaagcctaatccaggtggtaaccacagaaggaaggacggaactcaccccagcatatttttaggcctcatctcagtgcctatgaggggcctgccagaaaagtcactaacctgtctcagtgtggccttgtccagccttgtgttttctgtaacccctgtttgtggtacgagataatgagtcctatttttctctcacataatatgcatttgctctcctaggacagtgtaatacatttatgtgaagtaaagacatgcgagactggtggcctgcaaatagcatccgtcaatctgtgttaactgcatagggagggctctgcatagcacctgctatagcggtgtcatgttggatcgcttttgtgactgttcatctgtccttgacagtggctgtcatcttgactactttgttgatttgttggtattggggacattttaaaggctgagttatttttgaatgtcatgtttatgtcatagacgtagttttcgcatccttgaattaaactgccttaactccttttgtggtat

SEQ ID NO: 717 - DNA, 411 bp, Homo sapiens
cgatgactcaatcggcactgggtatgacctgtcagcctctacattctctcctgacggaagagtttttcaagttgaatatgctatgaaggctgtggaaaatagtagtacagctattggaatcagatgcaaagatggtgttgtctttggggtagaaaaattagtcctttctaaactttatgaagaaggttccaacaaaagactttttaatgttgatcggcatgttggaatggcagtagcaggtttgttggcagatgctcgttctttagcagacatagcaagagaagaagcttccaacttcagatctaactttggctacaacattccactaaaacatcttgcagacagagtggccatgtatgtgcatgcatatacactctacagtgctgttagaccttttgggctgcagtttca

SEQ ID NO: 718 - DNA, 393 bp, Homo sapiens
ataaatctatagttttattaagacaaaaactgacaatgtagtatgaagtttacatttaaacaaagtttacacaggaatctaacacatgcctaaaagaattttacaacgtagctctagatgcaagtctagacaatatcaagaactgatggttctcatgactcaagacagagcattttgggtatgttacttattaggatttcttaaaaaattgttttgtgtgtgtatgtgtgtgttttaaagtgaaccactgcccaatatgaaagtttaatcttctcctgagaccaaggcttttgaaatcactaaactcttggatcaattcagtgaaacttgtgctgtcagtgactgaaccctgccaacaatggtttcagtgttcaaagctcaaagaaaacggct

SEQ ID NO: 719 - DNA, 1264 bp, Homo sapiens
tggtttgtggtttttatgaagagatgtgaaaaaggaagtgtggaatgatgggatgagaagttgtatggggaagatgaatagaagaattaggtggttgaataaaattaaaaggtgtgtggttggatgaatgaatgagtgggatgatagatggacctaagtggttagtggatggacaggaggatggatggatgtgagagccccagaaggacataaggaaagatgggtggatagatggatgggcggatggaaggatatttaggaggatgaatgagcatgtgtgtggagagaggtgcccattcacactggcttgaacacatgggttagctgagccaaatgccagccctatgacaggccatcagtagctttccctgagctgttctgccaagaagctaaaattcattcaagccatgtggacttgttattgaggggaaaaagaatgagctctccctctttccacttggaagattcaccaactccccacccctcactccccactgtgggcacggaggcactgcgccacccagggcaagacctcgccctctctccagctcctctcccaggatatccaacatccctgtgaaaccagagatcttgctccagccggattcagagaaatttagcgggaaaggagaggccaaaggctgaacccaatggtgcaaggttttacggttcggtcatcctctgtcctgacgccgcggggccagcgggagaagaaagccagtgcgtctctgggcgcaggggccagtggggctcggaggcacaggcaccccgcgacactccaggttccccgacccacgtccctggcagccccgattatttacagcctcagcagagcacggggcgggggcagaggggcccgcccgggagggctgctacttcttaaaacctctgcgggctgcttagtcacagccccccttgcttgggtgtgtccttcgctcgctccctccctccgtcttaggtcactgttttcaacctcgaataaaaactgcagccaacttccgaggcagcctcattgcccagcggaccccagcctctgccaggttcggtccgccatcctcgtcccgtcctccgccggcccctgccccgcgcccagggatcctccagctcctttcgcccgcgccctccgttcgctccggacaccatggacaagttttggtggcacgcagcctggggactctgcctcgtgccgctgagcctggcgcagatcggtgagtgcccgccgcaggctgggcagcaagatgggtgcggggtgctcagcgcggac

SEQ ID NO: 720 - DNA, 423 bp, Homo sapiens
  modified_base (15): a, t, c, g, other or unknown
  modified_base (415): a, t, c, g, other or unknown
aattcggaacgaggnctgtacaacacagtgtcatacagggataatgctatcatatttaatatgaaacagtgttacgggcacaaattacccatttctacaaaataagtgtgcaagtgatgccacatattatccatattcaactgagctgtcatcaaaatacattttatttacaatatgtactatgatcagttggatattaagttctaaaatgatttacttcactgctacattataaaggtaaaagcaatgtgtaggaaaaagtgtgagattgtgtttttacatactgcttttgtagttgccatcgctggttcagttcgacttataacatatgtcttgcttgtaggatttaacacctccaataggggattcttctaacattacaggaggattcttaggggatccggggctttttcancagtatat

SEQ ID NO: 721 - DNA, 331 bp, Homo sapiens
  modified_base (207): a, t, c, g, other or unknown
aattcggaacgagggagaaatcagtctggtttccatcccagtcggggaagagagaggtgagagggaatcagaacgtacctagttgattccttggtgacaagtgcaatggggtatgggtagaatttattttcagagccaagaggacttgatggttataaataaagttgcctttagcaatggaatttacagatcgatcatgttgttccnaaagatgtgaataggatccacaataacaagttgattcagactaatgtagatatttagattagcaagtattgaacatttgatttcttaggactgagcttttaaatgaatttccattatttcttcc

SEQ ID NO: 722 - DNA, 2025 bp, Homo sapiens
cggcacgaggcaccccgagaggagaagcgcagcgcagtggcgagaggagccccttgtggcagcagcactacctgcccagaaaaatgctggaggctgggcgtggccccaggcctggggacctgtttttcctgtttcccgcagagttccctgcagcccggtccaggtccaggcgtgtgcattcatgagtgaggaacccgtgcaggcgctgagcatcctgacctggagagcaggggctggtcagggcgatggcagcagacctgggcccctggaatgacaccatcaatggcacctgggatggggatgagctgggctacaggtgccgcttcaacgaggacttcaagtacgtgctgctgcctgtgtcctacggcgtggtgtgcgtgcttgggctgtgtctgaacgccgtggcgctctacatcttcttgtgccgcctcaagacctggaatgcgtccaccacatatatgttccacctggctgtgtctgatgcactgtatgcggcctccctgccgctgctggtctattactacgcccgcggcgaccactggcccttcagcacggtgctctgcaagctggtgcgcttcctcttctacaccaacctttactgcagcatcctcttcctcacctgcatcagcgtgcaccggtgtctgggcgtcttacgacctctgcgctccctgcgctggggccgggcccgctacgctcgccgggtggccggggccgtgtgggtgttggtgctggcctgccaggcccccgtgctctactttgtcaccaccagcgcgcgcgggggccgcgtaacctgccacgacacctcggcacccgagctcttcagccgcttcgtggcctacagctcagtcatgctgggcctgctcttcgcggtgccctttgccgtcatccttgtctgttacgtgctcatggctcggcgactgctaaagccagcctacgggacctcgggcggcctccctagggccaagcgcaagtccgtgcgcaccatcgccgtggtgctggctgtcttcgccctctgcttcctgccattccacgtcacccgcaccctctactactccttccgctcgctggacctcagctgccacaccctcaacgccatcaacatggcctacaaggttacccggccgctggccagtgctaacagttgccttgaccccgtgctctacttcctggctgggcagaggctcgtacgctttgcccgagatgccaagccacccactggccccagccctgccaccccggctcgccgcaggctgggcctgcgcagatccgacagaactgacatgcagaggataggagatgtgttgggcagcagtgaggacttcaggcggacagagtccacgccggctggtagcgagaacactaaggacattcggctgtaggagcagaacacttcagcctgtgcaggtttatattgggaagctgtagaggaccaggacttgtgcagacgccacagtctccccagatatggaccatcagtgactcatgctggatgaccccatgctccgtcatttgacaggggctcaggatattcactctgtggtccagagtcaactgttcccataacccctagtcatcgtttgtgtgtataagttgggggaattaagtttcaagaaaggcaagagctcaaggtcaatgacacccctggcctgactcccatgcaagtagctggctgtactgccaaggtacctaggttggagtccagcctaatcaagtcaaatggagaaacaggcccagagaggaaggtggcttaccaagatcacataccagagtctggagctgagctacctggggtgggggccaagtcacaggttggccagaaaaccctggtaagtaatgagggctgagtttgcacagtggtctggaatggactgggtgccacggtggacttagctctgaggagtacccccagcccaagagatgaacatctggggactaatatcatagacccatctggaggctcccatgggctaggagcagtgtgaggctgtaacttatactaaaggttgtgttgcctgctaaaaaaaa

SEQ ID NO: 723 - DNA, 491 bp, Homo sapiens
tttttttttttgaaataattgaagaattcagttaaatatttattgaacaaatgcagagtaaatgaactaagggctgttataaccttaagttacaacaaacaacttcaaatattcagagggctgtcacacagagaatgaaagacttgctcagtatttctccaaagggcagaacttgagccaagggataaatataagcaaccaatgggctgcaggatagttgtacaaagtgtatcatgtatcttcatagcttctttgcccatataatgcattccacacttaagtttctccttctaaaaggcgacacgacaagttaatatgtctcataaatgtcttaaataagttgcattttcatggcaagccctccactgccagcaatggatatactcacactattggaaaaaatctaaagttaacaaactggtttagtatggaaatggtctatttgttcctcagctatgtttctgtatcctacattagtggctctcaggagg

SEQ ID NO: 724 - DNA, 410 bp, Homo sapiens
  modified_base (72): a, t, c, g, other or unknown
  modified_base (279): a, t, c, g, other or unknown
  modified_base (316): a, t, c, g, other or unknown
  modified_base (352): a, t, c, g, other or unknown
  modified_base (380): a, t, c, g, other or unknown
cgcagacaatgatggtcctggtgaattacatcttctttaaagccaaatgggagatgccctttgacccccaanatactcatcagtcaaggttctacttgagcaagaaaaagtgggtaatggtgcccatgatgagtttgcatcacctgactataccttacttccgggacgaggagctgtcctgcaccgtggtggagctgaagtacacaggcaatgccagcgcactcttcatcctccctgatcaagacaagatggaggaagtggaagccatgctgctcccanagaccctgaagcggtggagagactctctggagttcanagagataggtgagctctacctgccaaagttttccanctcgagggactataacctgaacgacatncttctccagctgggcattgaggaagccttc

SEQ ID NO: 725 - DNA, 461 bp, Homo sapiens
ctcatcaaaacatgatttattaattttaagcaagagtaagcatatgtgatagtggccagcttggggatagaactcttcctggttgatgcacagttcagcacctgttgggtcttggctgttgggatgataattcttttgggtgaggggaacagccgtggtcaaggctgcctgcacccccatccaggcacaggaccctgggcaaagtctcaaaagaggtagtgtttttactttcgcaccaacaatacaacataagtattgggtacaaaagaggagatttccttcccctctacctcaacgggcaaaaggccttccatcttcagaagaggcttgtgaggaccatcggttggatgacctcctagtgagttctggctcccattcagagcacagagaaacccacaaaaggggcctgtggatctggttccaggtctcaagggtacagcttggttacatccccaggcccc

SEQ ID NO: 726 - DNA, 436 bp, Homo sapiens
  modified_base (12): a, t, c, g, other or unknown
  modified_base (352): a, t, c, g, other or unknown
  modified_base (367): a, t, c, g, other or unknown
ggcacgagaatngaggcacaatatagcactgactgagttgtaaagcctcctgcctggagacttcagttatagctgtaataattaatcttatttataaaagccactccactaaccttttctctccaactgtaaacacagagacagctttgggaataagccaaaaacagggtgatctcattagattttgaagatatatgactcctttgggctacatttcatattgatcaatttctaggtatttttcactggcccaaagtattgcattcccttaacagcaagcacaagttctctatatcacttgttttttgttgttgttgttgttgtcgtcgttgttttgaggacggagttttgnctcaggtgccccggnagtggcagtggtgcaatctcagctcactggcaacctccacctccgggggttcaaggcaattctccggtt

SEQ ID NO: 727 - DNA, 451 bp, Homo sapiens
  modified_base (4): a, t, c, g, other or unknown
  modified_base (341): a, t, c, g, other or unknown
  modified_base (383): a, t, c, g, other or unknown
  modified_base (392): a, t, c, g, other or unknown
  modified_base (426): a, t, c, g, other or unknown
  modified_base (447): a, t, c, g, other or unknown
aatnattaacaagcaaaggcccagcagaattctgtgcttcttggtgaagaaagagaggagtccttgaatggcgggggagacacaaaagggaccccccaaaatccacatggggtgctgggaaccccaaaatccagtggaaggcacatcaggcacaaattccagagaggttctgagtggaatccctgccacaaatcccagccattggagatggaggagctcccaaaatttagaagtatccccaaagccaagaggaaaccaaatgatgggaggagacagggggctcagtctttgggcgggggtcccccaatttccagaagaactgggaaaaggcacatgggggncccccttcatcttcccggggtgggggaatggggggattcctnagggcagcntcaggggcagagacgaactttgtttgggttggtngggcaaggttccttgggcttnggag

SEQ ID NO: 728 - DNA, 1876 bp, Homo sapiens
tgccgggggggccagtgtgcccaccccagtctcttggcgtgctggagggcatcctggatggaattgaagtgaatggaacagaagccaagcaaggtggagtgtgggtcagacccagaggagaacagtgccaggtcaccagatggaaagcgaaaaagaaagaacggccaatgttccctgaaaaccagcatgtcagggtatatccctagttacctggacaaagacgagcagtgtgtcgtgtgtggggacaaggcaactggttatcactaccgctgtatcacttgtgagggctgcaagggcttctttcgccgcacaatccagaagaacctccatcccacctattcctgcaaatatgacagctgctgtgtcattgacaagatcacccgcaatcagtgccagctgtgccgcttcaagaagtgcatcgccgtgggcatggccatggacttggttctagatgactcgaagcgggtggccaagcgtaagctgattgagcagaaccgggagcggcggcggaaggaggagatgatccgatcactgcagcagcgaccagagcccactcctgaagagtgggatctgatccacattgccacagaggcccatcgcagcaccaatgcccagggcagccattggaaacagaggcggaaattcctgcccgatgacattggccagtcacccattgtctccatgccggacggagacaaggtggacctggaagccttcagcgagtttaccaagatcatcaccccggccatcacccgtgtggtggactttgccaaaaaactgcccatgttctccgagctgccttgcgaagaccagatcatcctcctgaaggggtgctgcatggagatcatgtccctgcgggcggctgtccgctacgaccctgagagcgacaccctgacgctgagtggggagatggctgtcaagcgggagcagctcaagaatggcggcctgggcgtagtctccgacgccatctttgaactgggcaagtcactctctgcctttaacctggatgacacggaagtggctctgctgcaggctgtgctgctaatgtcaacagaccgctcgggcctgctgtgtgtggacaagatcgagaagagtcaggaggcgtacctgctggcgttcgagcactacgtcaaccaccgcaaacacaacattccgcacttctggcccaagctgctgatgaaggtgactgacctccgcatgatcggggcctgccacgccagccgcttcctccacatgaaagtcgagtgccccaccgaactcttccccccactcttcctcgaggtctttgaggatcaggaagtctaaagcctcaggcggccagagggtgtgcggagctggtggggaggagcctggagagaaggggcagagctgggggctgagggagacccccccacaccccttctctccttcctctcgtccttggatagattcagctcccacacacacaccccgcactgcccaggtccctcctcagacctccagccctgggacagggcaaacaactgaacttgctatggaaaggacagtgtgggaggctgggggagctgtgtcctgcagttcccaggaccccatcctctcagaaggtaggggaagggcgggaggattgagaagggacaagccaccttgaccgtaggggaaggaggaatgtgggctgggggaagatgccctcaactcaccccctcacacacatgagagagagcccccacccagttccttggcctaggtctcccctccaggctgagggcctctctacttccccagatgcctgggtgcaaagaacggcttggcttggctcctcctctggaggttaaaatttatagtcattctaactgcacttggaaaccaagcaaggggagaagacaaatgaagaaaaact

SEQ ID NO: 729 - DNA, 495 bp, Homo sapiens
tttttttttaatggaagcaaaactttattcctcttggctggagaagagaactagtgggtggttgtgtacaggacccccatccctcacccctcccagaaccaaagaagacaagcagcgccaccaaatggctccctctgcccaagtgaaagccgagaggtcagcggctggctggggaggcaggtgagcgcacacggcacagggcaggggcggctgcagtgacaggcgggcggccagggcggcctgggccggggttgaggggaagagggcggggctgcttgggtagcggggcaggcttgggggctgccggctggcacgggccccagactcagggcaccacaacgcggtaggggctgcctgggatgtgctcgtccccccatttgaccaccagtgtgtaatcccccttgtccttgagcaggtaggacacgctgtagagccggattgccaagttctttaccaggagtttcccgcagggggcctttggccattaaccccacc

SEQ ID NO: 730 - DNA, 422 bp, Homo sapiens
  modified_base (20): a, t, c, g, other or unknown
  modified_base (110): a, t, c, g, other or unknown
  modified_base (186): a, t, c, g, other or unknown
  modified_base (336): a, t, c, g, other or unknown
  modified_base (372): a, t, c, g, other or unknown
  modified_base (395): a, t, c, g, other or unknown
ttccctaatactttattggntacctctaggcctgtgtgcggctgggtgggcttgggggagggcgtcactattcagcttctaggtggaggcatgagaaggccttggctagnccctccagggtcccatactgtggagtttggaggggcaggtctggcctttcctgggtcagcatagggcacccaggtnggggcacaggtggacacccagcacaggcacctaggcaggggcacaagctcactatccgttagccagcctaattgtgtttggagaaatattccttgctgtcatccacgttgggcttaatcgtgtcactaccaggcttccagccagcggganaaactttccccatgctcgtctgtgtactgggaaggnctgggaccagccgcagagcctanattccacggagcgtcccacaggcaaat

SEQ ID NO: 731 - DNA, 273 bp, Homo sapiens
gtgctgagtggcggcactctacatcgagatcccgggcggcggctgcccgaggggagcaaggacagctttgcagttctcctggagttcgctgaggagcagctgcgagccgaccatgtcttcatttgcttccacaagaaccgcgatgacagagccgccttgctccgaaccttcagctttttgggctttgagattgtgagaccggggcatccccttgtccccaagagacccgacgcttgcttcatggcctacacgttcgagagagagtcttcggga

SEQ ID NO: 732 - DNA, 896 bp, Homo sapiens
cctatcatcgcaaaactcatgatgctccggctgctcagttccctcctccttgtggccgttgcctcaggctatggcccaccttcctctcgcccttccagccgcgttgtcaatggtgaggatgcggtcccctacagctggccctggcaggtttccctgcagtatgagaaaagcggaagcttctaccacacctgtggcggtagcctcatcgcccccgactgggttgtgactgccggccactgcatctcgagctcccggacctaccaggtggtgttgggcgagtacgaccgtgctgtgaaggagggccccgagcaggtgatccccatcaactctggggacctctttgtgcatccactctggaaccgctcgtgtgtggcctgtggcaatgacatcgccctcatcaagctctcacgcagcgcccagctgggagacgccgtccagctcgcctcactccctccggctggtgacatccttcccaacgagacaccctgctacatcaccggctggggccgtctctataccaacgggccactcccagacaagctgcaggaggccctgctgccggtggtggactatgaacactgctccaggtggaactggtggggttcctccgtgaagaagaccatggtgtgtgctggaggggacatccgctccggctgcaatggtgactctggaggacccctcaactgccccacagaggatggtggctggcaggtccatggcgtgaccagctttgtttctgcctttggctgcaacacccgcaggaagcccacggtgttcactcgagtctccgccttcattgactggattgaggagaccatagcaagccactagaaccaaggcccagctggcagtgctgatcgatcccacatcctgaataaagaadaaagatctctcag

SEQ ID NO: 733 - DNA, 388 bp, Homo sapiens
  modified_base (91): a, t, c, g, other or unknown
  modified_base (223): a, t, c, g, other or unknown
  modified_base (292): a, t, c, g, other or unknown
  modified_base (314): a, t, c, g, other or unknown
tgctgttagtttaatgtggacagagacatcccacggcgtgactgttagttaggatgagtcagcttgggggagtttgtgcttcctgcttggngtggccagccacatgccaaggtcccctgccttctagcccagaatgacgggactgggcagaacacccccaacttttagctgccacttggctcattacagcagtaccagtatgggggtgggaggggtgaggctntggagtgaaggcggcgtatagggcagagactaagagggtcctgtgagattcttagaggagccatcctgntccaaggggcctgagctgagtntgggtctgtgagcatctgctgctcctctcagagaggggagatctcactctctgccagtctgtctagccccaaag

SEQ ID NO: 734 - DNA, 370 bp, Homo sapiens; identical to SEQ ID NO: 679
  modified_base (158): a, t, c, g, other or unknown

SEQ ID NO: 735 - DNA, 431 bp, Homo sapiens
tagtatgaaacttagtgttttagtagatcttgtgatttctgaaaacgaatttcttctaaacatcaagctatttttcttcactatctatacctgctatgcagagattgagaaccaaaccaaatggatatctgcttttaagattagaatttgttcttcatccttaaagcagaactcattgagatgaaaagatgctcttaatttatcacagaactgtgtatttaatagtatgcttattaaaatcacgaagtgtactggaatgctaagataaaagaactgtatagtttctgttatgtaatacgagaatagaaatgttattaaaatctttctataatttccagtgcttctgttttgaagaacaaaggcttaatccccaagaggaagtagatatgccagtgtttttctacattgatcctgaatttgctgaagatcca

SEQ ID NO: 736 - DNA, 223 bp, Homo sapiens
ctccccgcagctcctgcgccgagtgcctgaagttcgaaaagggcccctttgggaagaactgcagcgcggcgtgtccgggcctgcagctgtcgaacaaccccgtgaagggcaggacctgcaaggagagggactcagagggctgctgggtggcctacacgctggagcagcaggacgggatggaccgctacctcatctatgtggatgagagccgaggtgaggccgc

SEQ ID NO: 737 - DNA, 421 bp, Homo sapiens
  modified_base (331): a, t, c, g, other or unknown
tctttatttaaaataaagtttaaaaataatgtgggtagtgtaaaatattaatacagaaatgtataaagttgaaagtttcatgtgatctacactgttcaaagaaagctgtgaatagacctttctatgcatttataaacataagcacacacattttaaaatgagttcacactgtacacttttctattaataacttgtttcacctaatgtatcatggccatttttccatacacaatgaatgtactttattcattttaacagatacgaggatattcctatatgggctggaaccacacctttaaccctatccctttaatgacaggacatttagggntttctattactttctacccatggtccatttttacggcttctgtgggggatccttaaatattcccctcaggttcccggtttccattttgtt

SEQ ID NO: 738 - DNA, 366 bp, Homo sapiens
ttttgaaagtaaaaatttttattttgattgatttctcaatgtatagttcagtataatgccagtttttaatggcaaaaatttggttccactgaaactccataatgctacagagagctactactttttccaggaagtaggttaacagctagaaagaaaaaggacaatttcctagcagcatggcaacttaaactgcagatctaataggtctgcaacttttacactaaaaatggcacaaacagctggtgacacaagtgagaaatggggaacaagatgtgaacactgaaaagaacaatatatatactgtaaatatgatgaataaaccaaatgtagctataagaatcttaaaggatgattatagaaaaggga

SEQ ID NO: 739 - DNA, 398 bp, Homo sapiens
cttggaaatttttttattctccttgccaacatttcttttgacattttattacttaattatgtgacattaagaaataatttggttgcatattattttcaaaaagcagtaagaaagtagctattgagaaagaaggagggccataggtttttcaataaaacgttagaaacattataaaaaacgagactcccattacatggaaacacatgatcaaagatcagactaacacacattcaaacaggcttggttcgaaatagagttctccatttctttcagatgagccttttttcttaggctctttcagaagcacttcacaatgaacagaggtcttgccagctcatttcattagcggagaagcaaaggtatgatggcagaatcatgagaagatggaaataaggcct

SEQ ID NO: 740 - DNA, 369 bp, Homo sapiens
  modified_base (251): a, t, c, g, other or unknown
  modified_base (334): a, t, c, g, other or unknown
  modified_base (359): a, t, c, g, other or unknown
agatgttccaggagtagaattcctgactgctgtgtgaaagtgaactgctactccatctctgaaacatatctgagaaacggggcagaaaaccagtgtaaactgctcgtggtgaaattattgaacattgaagtgtgaggcttgtcctaagagcacgtcacctcccttgacacagattctgcatgtccttccctctggtagggatcctccagttccgtttctcaggcgaagtaaccagaggttccagtctggtnttgctttctggggagggaaggacagaggcacctaggttaataggattcccaggggtacttgattggggcacccacacatgganttcaggaggggggaccttaaggccnttcaggcagg

SEQ ID NO: 741 - DNA, 1225 bp, Homo sapiens
cgcatctggagaaccagcggttaccatggaggggatcagtatatacacttcagataactacaccgaggaaatgggctcaggggactatgactccatgaaggaaccctgtttccgtgaagaaaatgctaatttcaataaaatcttcctgcccaccatctactccatcatcttcttaactggcattgtgggcaatggattggtcatcctggtcatgggttaccagaagaaactgagaagcatgacggacaagtacaggctgcacctgtcagtggccgacctcctctttgtcatcacgcttcccttctgggcagttgatgccgtggcaaactggtactttgggaacttcctatgcaaggcagtccatgtcatctacacagtcaacctctacagcagtgtcctcatcctggccttcatcagtctggaccgctacctggccatcgtccacgccaccaacagtcagaggccaaggaagctgttggctgaaaaggtggtctatgttggcgtctggatccctgccctcctgctgactattcccgacttcatctttgccaacgtcagtgaggcagatgacagatatatctgtgaccgcttctaccccaatgacttgtgggtggttgtgttccagtttcagcacatcatggttggccttatcctgcctggtattgtcatcctgtcctgctattgcattatcatctccaagctgtcacactccaagggccaccagaagcgcaaggccctcaagaccacagtcatcctcatcctggctttcttcgcctgttggctgccttactacattgggatcagcatcgactccttcatcctcctggaaatcatcaagcaagggtgtgagtttgagaacactgtgcacaagtggatttccatcaccgaggccctagctttcttccactgttgtctgaaccccatcctctatgctttccttggagccaaatttaaaacctctgcccagcacgcactcacctctgtgagcagagggtccagcctcaagatcctctccaaaggaaagcgaggtggacattcatctgtttccactgagtctgagtcttcaagttttcactccagctaacacagatgtaaaagactttttttttatacgataaataacttttttttaagttacacatttttcagatataaaagactgaccaatattgtacagtttttattgcttgttggatttttgtcttgtgtttctttagtttttgtg

SEQ ID NO: 742 - DNA, 227 bp, Homo sapiens
cacccacggtgaccgttttcatcagcagctccctcaacaccttccgctccgagaagcgatacagccgcagcctcaccatcgctgagttcaagtgtaaactggagttgctggtgggcagccctgcttcctgcatggaactgggagctgtatggagttgacgacaagttctacagcaagctggatcaagaggatgcgctcctgggctcctaccctgtagatgacggctg

SEQ ID NO: 743 - DNA, 1959 bp, Homo sapiens
ttggagtcaacactttcgattccaccttgggaagcccccaaggagcataagtacaaagctgaagagcacacagtcgttctcactgtcaccggggagccctgccacttccccttccagtaccaccggcagctgtaccacaaatgtacccacaagggccggccaggccctcagccctggtgtgctaccacccccaactttgatcaggaccagcgatggggatactgtttggagcccaagaaagtgaaagaccactgcagcaaacacagcccctgccagaaaggagggacctgtgtgaacatgccaagcggcccccactgtctctgtccacaacacctcactggaaaccactgccagaaagagaagtgctttgagcctcagcttctccggtttttccacaagaatgagatatggtatagaactgagcaagcagctgtggccagatgccagtgcaagggtcctgatgcccactgccagcggctggccagccaggcctgccgcaccaacccgtgcctccatgggggtcgctgcctagaggtggagggccaccgcctgtgccactgcccggtgggctacaccggacccttctgcgacgtggacaccaaggcaagctgctatgatggccgcgggctcagctaccgcggcctggccaggaccacgctctcgggtgcgccctgtcagccgtgggcctcggaggccacctaccggaacgtgactgccgagcaagcgcggaactggggactgggcggccacgccttctgccggaacccggacaacgacatccgcccgtggtgcttcgtgctgaaccgcgaccggctgagctgggagtactgcgacctggcacagtgccagaccccaacccaggcggcgcctccgaccccggtgtcccctaggcttcatgtcccactcatgcccgcgcagccggcaccgccgaagcctcagcccacgacccggaccccgtctcagtcccagaccccgggagccttgccggcgaagcgggagcagccgccttccctgaccaggaacggcccactgagctgcgggcagcggctccgcaagagtctgtcttcgatgacccgcgtcgttggcgggctggtggcgctacgcggggcgcacccctacatcgccgcgctgtactggggccacagtttctgcgccggcagcctcatcgccccctgctgggtgctgacggccgctcactgcctgcaggaccggcccgcacccgaggatctgacggtggtgctcggccaggaacgccgtaaccacagctgtgagccgtgccagacgttggccgtgcgctcctaccgcttgcacgaggccttctcgcccgtcagctaccagcacgacctggctctgttgcgccttcaggaggatgcggacggcagctgcgcgctcctgtcgccttacgttcagccggtgtgcctgccaagcggcgccgcgcgaccctccgagaccacgctctgccaggtggccggctggggccaccagttcgagggggcggaggaatatgccagcttcctgcaggaggcgcaggtaccgttcctctccctggagcgctgctcagccccggacgtgcacggatcctccatcctccccggcatgctctgcgcagggttcctcgagggcggcaccgatgcgtgccagggtgattccggaggcccgctggtgtgtgaggaccaagctgcagagcgccggctcaccctgcaaggcatcatcagctggggatcgggctgtggtgaccgcaacaagccaggcgtctacaccgatgtggcctactacctggcctggatccgggagcacaccgtttcctgattgctcagggactcatctttccctccttggtgattccgcagtgagagagtggctggggcatggaaggcaagattgtgtcccattcccccagtgcggccagctccgcgccaggatggcgcaggaactcaataaagtgctttgaaaatgctg

SEQ ID NO: 744 - DNA, 77 bp, Homo sapiens
ctactcctagatatttggcatgatcttcagtatgatcttgtgctgtgctatccgcaggaaccgcgagatggtctaga

SEQ ID NO: 745 - DNA, 2373 bp, Homo sapiens
gaattcgggcgggggcgccgcccggggccctgagggctggctagggtccaggccgggggggacgggacagacgaaccagccccgtgtaggaagcgcgacaatgccccgctacggagcgtcactccgccagagctgccccaggtccggccgggagcagggacaagacgggaccgccggagcccccggactcctttggatgggcctggtgctggcgctggcgctggcgctggcgctggctctgtctgactctcgggttctctgggctccggcagaggctcaccctctttctccccaaggccatcctgccaggttacatcgcatagtgccccggctccgagatgtctttgggtgggggaacctcacctgcccaatctgcaaaggtctattcaccgccatcaacctcgggctgaagaaggaacccaatgtggctcgcgtgggctccgtggccatcaagctgtgcaatctgctgaagatagcaccacctgccgtgtgccaatccattgtccacctctttgaggatgacatggtggaggtgtggagacgctcagtgctgagcccatctgaggcctgtggcctgctcctgggctccacctgtgggcactgggacattttctcatcttggaacatctctttgcctactgtgccgaagccgccccccaaaccccctagccccccagccccaggtgcccctgtcagccgcatcctcttcctcactgacctgcactgggatcatgactacctggagggcacggaccctgactgtgcagacccactgtgctgccgccggggttctggcctgccgcccgcatcccggccaggtgccggatactggggcgaatacagcaagtgtgacctgcccctgaggaccctggagagcctgttgagtgggctgggcccagccggcccttttgatatggtgtactggacaggagacatccccgcacatgatgtctggcaccagactcgtcaggaccaactgcgggccctgaccaccgtcacagcacttgtgaggaagttcctggggccagtgccagtgtaccctgctgtgggtaaccatgaaagcatacctgtcaatagcttccctccccccttcattgagggcaaccactcctcccgctggctctatgaagcgatggccaaggcttgggagccctggctgcctgccgaagccctgcgcaccctcagaattggggggttctatgctctttccccataccccggtctccgcctcatctctctcaatatgaatttttgttcccgtgagaacttctggctcttgatcaactccacggatcccgcaggacagctccagtggctggtgggggagcttcaggctgctgaggatcgaggagacaaagtgcatataattggccacattcccccagggcactgtctgaagagctggagctggaattattaccgaattgtagccaggtatgagaacaccctggctgctcagttctttggccacactcatgtggatgaatttgaggtcttctatgatgaagagactctgagccggccgctggctgtagccttcctggcacccagtgcaactacctacatcggccttaatcctggttaccgtgtgtaccaaatagatggaaactactccaggagctctcacgtggtcctggaccatgagacctacatcctgaatctgacccaggcaaacataccgggagccataccgcactggcagcttctctacagggctcgagaaacctatgggctgcccaacacactgcctaccgcctggcacaacctggtatatcgcatgcggggcgacatgcaacttttccagaccttctggtttctctaccataagggccacccaccctcggagccctgtggcacgccctgccgtctggctactctttgtgcccagctctctgcccgtgctgacagccctgctctgtgccgccacctgatgccagatgggagcctcccagaggcccagagcctgtggccaaggccactgttttgctagggccccagggcccacatttgggaaagttcttgatgtaggaaagggtgaaaaagcccaaatgctgctgtggttcaaccaggcaagatcatccggtgaaagaaccagtccctgggccccaaggatgccggggaaacaggaccttctcctttcctggagctggtttagctggatatgggagggggtttggctgcctgtgcccaggagctagactgccttgaggctgctgtcctttcacagccatggagtagaggcctaagttgacactgccctgggcagacaagacaggagctgtcgccccaggcctgtgctgcccagccaggaaccctgtactgctgctgcgacctgatgctgccagtctgttaaaataaagcccgcccgaattc

SEQ ID NO: 746 - DNA, 280 bp, Homo sapiens
  modified_base (166): a, t, c, g, other or unknown
  modified_base (215): a, t, c, g, other or unknown
  modified_base (217): a, t, c, g, other or unknown
  modified_base (220): a, t, c, g, other or unknown
  modified_base (228)..(229): a, t, c, g, other or unknown
  modified_base (238): a, t, c, g, other or unknown
  modified_base (240): a, t, c, g, other or unknown
tgaagatggagctaatctttcctctgctcgtggcattttgtcgcttatccagtcttctactcgtagggcataccagcagatcttggatgtgctggatgaaaatcgcagacctgtgttgcgtggtgggtctgctgccgccacttctaatcctcatcatgacaacgtnaggtatggcatttcaaatatagatacaaccattgaaggaaagacccccncnccncgactgtnntagatgcancncccccccagaagacagataatcaaactaaatagacgtcta

SEQ ID NO: 747 - DNA, 430 bp, Homo sapiens
  modified_base (360): a, t, c, g, other or unknown
aaagatcctaacagaacatagcgtaacaatattggtcttccaggtgttactcatttcaattatgtgtagtataccaggacagacctattttcatgtcttatttctttaaagagctgcttcattggccgggcgccatggctcacgtctgtaatcccagcactttgggaggccgaggcgggtcgggttacttgaggtcaggagttcgagaccagcctggcaaacatggcgaaaccccatcttaactaaaaatacaaaaaaattagccgggtgtggtgtcacgcgcctgtaatcccagctacttggggggctcaggcaggagaattgcctgaacccaggaggcggaggttgcagttgaagctnagattgggccattgcactccagcctgggaaacagagtgaagacgctgtctaaaaaaaaaaaaaaaaaaaa

SEQ ID NO: 748 - DNA, 368 bp, Homo sapiens
accatttaaaaaaacaatttatataaatagattcgtatacaaagaagaaacacatatacagagtaccccaattaccagtatggtggaccctaccccttcttttctgcattgggaaacagaacagagaacagaaaaaatcattccatcttgctcttaactctttccacctatgtgctcagtttttcaagtagaatttctattcctttgctggtgcttttggttttttccaatgtaggaatcaagcttttcagtgcagctttgactttgtttgcaacttccaggtcacaactctggaggaggctagaaagaataatggcacctcgatttacactagcccaggacttcaggttcttcataccaacatgctc

SEQ ID NO: 749 - DNA, 432 bp, Homo sapiens
tgatcttctgtgcctagcacaagagttgatacataaggagtactttataaataaaaaaatgaaagtgtagtgatgagattcctttagctatctatctatatgtatatatctggttattcaaagcttccccacccccagtcatctaaatttttcaggtatcaagtgctcaacagacatatgatagtcaaggctcttagtctcattttttactctttgtcaagagaaatggaaaataagagtacttgggccctcttaagggagctcagagagaattactaaattagggacagtttcaatagttatcattctgtctacatgaacgatcaagaccaggactcagggaactttactctgtaacagaaagagaggattcagtgtttgccctgggagaattgtcccattcttgttgcttctctcctgagtacccactac

SEQ ID NO: 750 - DNA, 511 bp, Homo sapiens
  modified_base (5): a, t, c, g, other or unknown
  modified_base (193): a, t, c, g, other or unknown
  modified_base (197): a, t, c, g, other or unknown
  modified_base (199): a, t, c, g, other or unknown
  modified_base (201): a, t, c, g, other or unknown
  modified_base (203): a, t, c, g, other or unknown
  modified_base (218): a, t, c, g, other or unknown
  modified_base (291): a, t, c, g, other or unknown
  modified_base (299): a, t, c, g, other or unknown
  modified_base (344): a, t, c, g, other or unknown
  modified_base (369): a, t, c, g, other or unknown
  modified_base (406): a, t, c, g, other or unknown
  modified_base (427): a, t, c, g, other or unknown
  modified_base (435): a, t, c, g, other or unknown
  modified_base (507): a, t, c, g, other or unknown
gcgantggcattgagctacaggcaggagatgaggtggagttctcagtgattcttaatcagcgcactggcaagtgagcgccctgtaatgtttggcgagtctgtgagggccccaaggctgttgcagctcctcgacctgatcggttggtcaatcgcttgaagaatatcactctggatgatgccagtgctcctcgcntaanangngnttcttcgtcagccanggggaccagataactcaatgggttttggtgcagaaagaaagatccgtcaagctggtgtcattgactaaccacntccacaangcacaccatttaatccactatgatcaagttggggggaatctggtnaagggttctgaatatctccctcttnatccctcccgaaatctgggaatacttattctattggngctattacaccagttttaaanaccttccncggggttatggttttaaaaaaataaataaattttagaaaacccttttaaataatgcacagttgcagcctggnaaaa

SEQ ID NO: 751 - DNA, 1866 bp, Homo sapiens
cccagagcaagaccacagctggtgaacagtccaggagcagacaagatggagacaaattcctctctccccacgaacatctctggagggacacctgctgtatctgctggctatctcttcctggatatcatcacttatctggtatttgcagtcacctttgtcctcggggtcctgggcaacgggcttgtgatctgggtggctggattccggatgacacacacagtcaccaccatcagttacctgaacctggccgtggctgacttctgtttcacctccactttgccattcttcatggtcaggaaggccatgggaggacattggcctttcggctggttcctgtgcaaattcctctttaccatagtggacatcaacttgttcggaagtgtcttcctgatcgccctcattgctctggaccgctgtgtttgcgtcctgcatccagtctggacccagaaccaccgcaccgtgagcctggccaagaaggtgatcattgggccctgggtgatggctctgctcctcacattgccagttatcattcgtgtgactacagtacctggtaaaacggggacagtagcctgcacttttaacttttcgccctggaccaacgaccctaaagagaggataaatgtggccgttgccatgttgacggtgagaggcatcatccggttcatcattggcttcagcgcacccatgtccatcgttgctgtcagttatgggcttattgccaccaagatccacaagcaaggcttgattaagtccagtcgtcccttacgggtcctctcctttgtcgcagcagccttttttctctgctggtccccatatcaggtggtggcccttatagccacagtcagaatccgtgagttattgcaaggcatgtacaaagaaattggtattgcagtggatgtgacaagtgccctggccttcttcaacagctgcctcaaccccatgctctatgtcttcatgggccaggacttccgggagaggctgatccacgcccttcccgccagtctggagagggccctgaccgaggactcaacccaaaccagtgacacagctaccaattctactttaccttctgcagaggtggcgttacaggcaaagtgaggagggagctgggggacactttcgagctcccagctccagcttcgtctcaccttgagttaggctgagcacaggcatttcctgcttattttaggattacccactcatcagaaaaaaaaaaaaagcctttgtgtcccctgatttggggagaataaacagatatgagtttattattgacttcttttttgattttggacctcagcctcgggtggtcagggtgggaaatgataggaagaagctgtcatctgcatcctagtttgcctgaaatgaacccaaataatacccattattattagtcctgaattatgagtagtgaatgatacccatcattctggcatcatgatgagtagtgtccacttccattctgaaaagtgccctgctgtgaaaaataaattatatagtcatcctaggtaaatgaaggaggagggagaagtgtgaaagagtatggcttaaatcagacaagatatacaagaagatactttatatagggcaggagcggtggctcatgcctgtaatcccagcactttgggaggccgaggcaggcggatcaccagaggtcaggaattcgagaacagcctggccaacatggtgaaaccctgtctctactaaaaatacaaaaattagctgggcgtagtggcaggctcccgtaatcccagctactcaggagaccgaggcaggagaatcgcttggacctggaaggcggaggttgtagtgagccaagaaaacgccactacactccagcctgggtgacagagagagactccggctcag

SEQ ID NO: 752 - DNA, 4131 bp, Homo sapiens
tcaagctcgccccgcgcagcccgagccgggctgggcgctgtcctcgggggcctggggaaccgcgcggtttggagatcggaggcacctggaacccgtggcaagcgccgagccgggagacagcccgaggaaccacgggttctggagctaggagccggaagctgggagtccggaggagagcggagcccggagcccggagcccggggcggcgcgtctgggtctggcgcttcccgactggacggcgcgcccgctggtcttcgccacgcgccctcccctgggctcgcgttcatcggtccccgcctgagacgcgcccactcctgcccggacttccagccccggaggcgccggacagagccgcggactccagcgcccaccatgcgcctcaacagctccgcgccgggaaccccgggcacgccggccgccgaccccttccagcgggcgcaggccggactggaggaggcgctgctggccccgggcttcggcaacgcttcgggcaacgcgtcggagcgcgtcctggcggcacccagcagcgagctggacgtgaacaccgacatctactccaaagtgctggtgaccgccgtgtacctggcgctcttcgtggtgggcacggtgggcaacacggtgacggcgttcacgctggcgcggaagaagtcgctgcagagcctgcagagcacggtgcattaccacctgggcagcctggcgctgtccgacctgctcaccctgctgctggccatgcccgtggagctgtacaacttcatctgggtgcaccacccctgggccttcggcgacgccggctgccgcggctactacttcctgcgcgacgcctgcacctacgccacggccctcaacgtggccagcctgagtgtggagcgctacctggccatctgccaccccttcaaggccaagaccctcatgtcccgaagccgcaccaagaagttcatcagcgccatctggctcgcctcggccctgctgacggtgcctatgctgttcaccatgggcgagcagaaccgcagcgccgacggccagcacgccggcggcctggtgtgcacccccaccatccacactgccaccgtcaaggtcgtcatacaggtcaacaccttcatgtccttcatattccccatggtggtcatctcggtcctgaacaccatcatcgccaacaagctgaccgtcatggtacgccaggcggccgagcagggccaagtgtgcacggtcgggggcgagcacagcacattcagcatggccatcgagcctggcagggtccaggccctgcggcacggcgtgcgcgtcctacgtgcagtggtcatcgcctttgtggtctgctggctgccctaccacgtgcggcgcctcatgttctgctacatctcggatgagcagtggactccgttcctctatgacttctaccactacttctacatggtgaccaacgcactcttctacgtcagctccaccatcaaccccatcctgtacaacctcgtctctgccaacttccgccacatcttcctggccacactggcctgcctctgcccggtgtggcggcgcaggaggaagaggccagccttctcgaggaaggccgacagcgtgtccagcaaccacaccctctccagcaatgccacccgcgagacgctgtactaggctgtgcgccccggaacgtgtccaggaggagcctggccatgggtccttgcccccgacagacagagcagcccccacccgggagccttgatgggggtcaggcagaggccagcctgcactggagtctgaggcctgggacccccccctcccaccccctaacccatgtttctcattagtgtctcccgggcctgtccccaactcctccccacccctcccccatctcctctttgaaagccagaacaagagagcgctcctctcccagataggaaaagggcctctaacaaggagaaattagtgtgcggcaaaaggcagttttctttgttctcagactaatggatggttccagagaaggaaatgaaatgtgctgggtggggccgggcctccggcggcccggctgctgttcccatgtccacatctctgaggcctgcaccccctctgtctagctcggggagtccagccccagtcccgcaggctccgtggctttgggcctcacgtgcagaccctgccatgcagacccatgcccccctcccccaggcagctccaagaaagctccctgactcgccccttcaggcctggcaagctgggggcccatcgccgtggggagtccctcccaccaccctcgccgcaggcagctgcagcccccagaggggaccacaagcccaaaaaggacaaaaatgggctggcctggaatggcccagaccccagcctcccctcctccctcccatcctcacccaggccaaggcccaggggctctgccaggacaccacatgggagggggctcaggcctcagcctcaagatcttcagctgtggcctctcgggctcggcagaagggacgccggatcaggggcctggtctccagcacctgcccgagtggccgtggccaggatggggtgcgcattccgtgtgctttgcttgtagctgtgcaggctgaggtctggagccaggcccagagctggcttcagggtggggccttgagaaggggaatgtgggacaggggcgatggtgcctggtctctgagtaagatgccaggtcccaggaactcaggcttcaggtgagaaggagcggtgtgtccaggcaccgctggccggcagccctgggctgaggcacagactcatttgtcaccttctggcggcggcagccctggccccggcctccaagcagttgaaaaagctggcgcctccttggtctctaggatccaggctccacagagcacatgactagccaggcccctggcttaagaaggtcgcctaagcctaagagaagacagtcccaggagaagctggccgggaccagccaggagctgggagccacaggaagcaaaagtcagccttttcttcaagggatttccctgtctcagagcagcctttgccccagggaaatgggctctgggctggctgcctgcaccggccatgtcgacccaggacccggacacctggtcttgggctgtgttcagccactttgccttctctggactcagtttccccgtctgagaaatgagagtcgaatgctacagtatctgcagtcgcttggatctggctgttgagttgacgggttccttgaaccccacaaaatccctctccaaccacaggacccttcggctcaccaagaacggggcccaggggagtcaggcctattcgctgcacttcctgccaaactttgcccccacaagcctggtcatcagccaggcagccctcccagtgcccaagggccaccaaccccagggaaacagggccagcacagaggggccttcctcccccacagagctcccatgacatagtctgctctgggcggaagagctttgctgccagccagggatgtccagaggtcggtgcagcccctatccctgctcaggagtgggctcagagtctagcaaatgctaaggcccctcaggctgggctctgaacgaggacctggactcagagccagacagggcagcctcagacccttctctggggctcctggaccttgggccataatttctgagcctcggtttccccatctaaggaacagatgtggtcgttccgccctctcagctggatgagactgtcctggaggatccaccccggaacagacagaacggtgtctctcaggatggtgctctgagagagggcagagtggatgccccactgccctagaccctcggtagacgtggggtctctggggcggggtctgtggctgtgactgaagtcggctttcccgttgatgtcttgatgctcctatctgtgcacttaccgtaggtagggacacgtgtccatgcaccacagacacacccacgacacctgatctcgtatcactagcttgcggccaggtcatgatgtggccccggaagctggccctgcgtgccatgagtgcgtcggtcatggagtccggagcccctgagccggcccctggtgacggcacagccctcacagctcaaacgcccacccccactcccaccatctgcaggtggtgaaaacaaaccccgtgtatctctcaataaaggtggccgaagggcctcgatgtgg

SEQ ID NO: 753 - DNA, 1434 bp, Homo sapiens
atgctgccgccaggcagcaacggcaccgcgtacccggggcagttcgctctataccagcagctggcgcaggggaacgccgtggggggctcggcgggggcaccgccactggggccctcacaggtggtcaccgcctgcctgctgaccctactcatcatctggaccctgctgggcaacgtgctggtgtgcgcagccatcgtgcggagccgccacctgcgcgccaacatgaccaacgtcttcatcgtgtctctggccgtgtcagaccttttcgtggcgctgctggtcatgccctggaaggcagtcgccgaggtggccggttactggccctttggagcgttctgcgacgtctgggtggccttcgacatcatgtgctccactgcctccatcctgaacctgtgcgtcatcagcgtggaccgctactgggccatctccaggcccttccgctacaagcgcaagatgactcagcgcatggccttggtcatggtcggcctggcatggaccttgtccatcctcatctccttcattccggtccagctcaactggcacagggaccaggcggcctcttggggcgggctggacctgccaaacaacctggccaactggacgccctgggaggaggacttttgggagcccgacgtgaatgcagagaactgtgactccagcctgaatcgaacctacgccatctcttcctcgctcatcagcttctacatccccgttgccatcatgatcgtgacctacacgcgcatctaccgcatcgcccaggtgcagatccgcaggatttcctccctggagagggccgcagagcacgcgcagagctgccggagcagcgcagcctgcgcgcccgacaccagcctgcgcgcttccatcaagaaggagaccaaggttctcaagaccctgtcggtgatcatgggggtcttcgtgtgttgctggctgcccttcttcatccttaactgcatggtccctttctgcagtggacaccccgaaggccctccggccggcttcccctgcgtcagtgagaccaccttcgacgtcttcgtctggttcggctgggctaactcctcactcaaccccgtcatctatgccttcaacgccgactttcagaaggtgtttgcccagctgctggggtgcagccacttctgctcccgcacgccggtggagacggtgaacatcagcaatgagctcatctcctacaaccaagacatcgtcttccacaaggaaatcgcagctgcctacatccacatgatgcccaacgccgttacccccggcaaccgggaggtggacaacgacgaggaggagggtcctttcgatcgcatgttccagatctatcagacgtccccagatggtgaccctgttgctgagtctgtctgggagctggactgcgagggggagatttctttagacaaaataacacctttcaccccgaatggattccattaa

SEQ ID NO: 754 - DNA, 1382 bp, Homo sapiens
ccatggcgtccccggcgctggcggcggcgctggcggtggcggcagcggcgggccccaatgcgagcggcgcgggcgagaggggcagcggcggggttgccaatgcctcgggggcttcctgggggccgccgcgcggccagtactcggcgggcgcggtggcagggctggctgccgtggtgggcttcctcatcgtcttcaccgtggtgggcaacgtgctggtggtgatcgccgtgctgaccagccgggcgctgcgcgcgccacagaacctcttcctggtgtcgctggcctcggccgacatcctggtggccacgctggtcatgcccttctcgttggccaacgagctcatggcctactggtacttcgggcaggtgtggtgcggcgtgtacctggcgctcgatgtgctgttttgcacctcgtcgatcgtgcatctgtgtgccatcagcctggaccgctactggtcggtgacgcaggccgtcgagtacaacctgaagcgcacaccacgccgcgtcaaggccaccatcgtggccgtgtggctcatctcggccgtcatctccttcccgccgctggtctcgctctaccgccagcccgacggcgccgcctacccgcagtgcggcctcaacgacgagacctggtacatcctgtcctcctgcatcggctccttcttcgcgccctgcctcatcatgggcctggtctacgcgcgcatctaccgagtggccaagctgcgcacgcgcacgctcagcgagaagcgcgcccccgtgggccccgacggtgcgtccccgactaccgaaaacgggctgggcgcggcggcaggcgcaggcgagaacgggcactgcgcgcccccgcccgccgacgtggagccggacgagagcagcgcagcggccgagaggcggcggcgccggggcgcgttgcggcggggcgggcggcggcgagcgggcgccgaggggggcgcgggcggtgcggacgggcagggggcggctgagtcgggggcgctgaccgcctccaggtccccggggcccggtggccgcctgtcgcgcgccagctcgcgctccgtcgagttcttcctgtcgcgccggcgccgggcgcgcagcagcgtgtgccgccgcaaggtggcccaggcgcgcgagaagcgcttcacctttgtgctggctgtggtcatgggtgtgttcgtgctctgctggttccccttcttcttcagctacagcctgtacggcatctgccgcgaggcctgccaggtgcccggcccgctcttcaagttcttcttctggatcggctactgcaacagctcgctcaacccggtcatctacacggtcttcaaccaggatttccggcgatcctttaagcacatcctcttccgacggaggagaaggggcttcaggcagtgactc

SEQ ID NO: 755 - DNA, 243 bp, Homo sapiens
tgtaaacagattggagaatctagcaataagattcaaagctaatctggagcataaaggcacagttcagagacagaataacagggatcacaagcatgaattaaaaggaatttatttgcttcaagttcctagatacaaccttcccatgctgcacttctccactgtcggagcacgttccgaaaaacagaatgccttgatccctggtgggtgcgaaggagttgttagggatggcaggcattggtgggc

SEQ ID NO: 756 - DNA, 449 bp, Homo sapiens
ttttgcaaatcagagaaataaccacattagaaaaagcaatatgccttttttttttaaaatggcacatcaagtgactctcattttaaaatatctcttttcttaacccttaatttgaatgcaaaatgatgctgtggtcagaaggaatgccaggtggcgaccgtgatacctttaatgacaataggaacgtagcagagggacaacagcaatgacaacagaaagcagctgtgatccagcagcagctggcaaagcttagtaagcaacctcatccccagatgcatccgctcagccagtgttgtgattgctagatactatctgtaagtgaaccaaactaaaattcatttatgaaccaagaaaggaagccaagttgaaaaggtctcgagttaaatcgagaatgattcaggcgggccggctctctgagcacctttggatgcacttcagcttctgtcttg

SEQ ID NO: 757 - DNA, 284 bp, Homo sapiens
  modified_base (17): a, t, c, g, other or unknown
  modified_base (128): a, t, c, g, other or unknown
  modified_base (222): a, t, c, g, other or unknown
tcacatttgagctggtngccaggtttgctgtggcccctgacttcctcaagttcttcaagaatgccctaaaccttattgacctcatgtccatcgtccccttttacatcactctggtggtgaacctggtngtggagagcacacctactttagccaacttgggcagggtggcccaggtcctgaggctgatgcggatcttccgatcttaaagctggccaggcactncactggcctccgctccctgggggccactttgaaatacagctacaaggaagtagggctgctct

SEQ ID NO: 758 - DNA, 476 bp, Homo sapiens
gtatcagtaggtaataggatattttatttcaaaacagtgaagaagctgctaagcataaaatttgtcaaatgctacaaaggtgatgaatatacaactgggaattccaagaaatttaaatttaattacattctttattatcttttcctcaaaagaaataaattagttccaccatttggctaatattatttcattaaagactgaatttagattttaggaaataaaatatggaatctgttataatgtcccaatttatactacagtattaatctcaatcctgatcattacataattatagcatttaccaatctgtgattttataaattaaccaaatttgttaaattaagaagaaattcatagacaccatttttttcctgttacaacatatggaaaagccatcaaaaaacttaacagaaccaaatcaaaaagaagtatattttatgctaaagttactttctgtccaggtcgaaacattgttc

SEQ ID NO: 759 - DNA, 590 bp, Homo sapiens
tcagtgagatgtcatttattaagcagttacaatgctgcaggtgctgtgcaggagactggacatacaaaagaagaatttgacccagaccttccccctcgtgggtcgtcataatcttgtagggggaagggaatacaaatacaaattagcgaagaatgatagcagtatcttaggacactgtaactgtgtgctacgggacccaaggactggagagccatcccttcgtgaaggtcagggaagagctgggtggtggagagagctgagcctgtgtggacccctgatgcatgctctgatgctgagggagtacagtagagatggacactgatagtgacagaagagtttggccccaaagcagaagcggcatcctgcaccgactccccttagaatgaatgagtacgcacaagaaaacaaccacaggcatcgcgcatcttcagtggatctctttgctggagaattgacagagtgcgtgtcgcgcctgagtgagccggtaaattctctccttaaggattcttctcttggtagcggtctcactctgctctttgagcagccaggaatagcgatttttttcctgtagtatctgcatcatggctttc

SEQ ID NO: 760 - DNA, 486 bp, Homo sapiens
  modified_base (293): a, t, c, g, other or unknown
ggaacacgctgcggggctcccgggcctgagccagtgtctgttctccacgcaggtgttccgcgcgccccgttcagccatgtcgtccggcatccatgtagagctggtgactggaggcaacaagggcatcggcttggcatcgtgcgcgacctgtgccggctgttctcgggggacgtggtgctcacggcgcgggacgtgacgcggggccaggcggcgtacagcagctgcaggcggagggcctgagccgcgcttccaccagctggacatcgacgatctgcagacatccgcccctgccnttcctgcgcaaggagtacgggggcctggacgtgctggtcaacaacgcgggcatcgcttcaaggttgctgatcccacaccctttcatattcaagctgaagtgacgatgaaaacaaatttctttggtacccgagatgtgtgcacagaattactccctctaataaaaccccaagggagagtggtgaacgtatctag

SEQ ID NO: 761 - DNA, 241 bp, Homo sapiens
aaagatgtaaatcgtggaggttacggccaagccagttccattaaattcaggagtcagattccaggtttatgtagaagtttctaaaatgaaaatcaatgttactgaaattcctgacacattgcgtgaagatcaaatgagagacaaactagagctgagcttttcaaagtcgcgaaatggaggcggagaggtggaccgcgtggactatgacagacagtccgggagtgcagtcatcacggttgtg

SEQ ID NO: 762 - DNA, 410 bp, Homo sapiens
  modified_base (359): a, t, c, g, other or unknown
gttaaaacatgaaaaaaaattttattgttttagacaaagaggccacttttggaaaataatacttttttttttttagttgaatcaggtgaagacagagttaaaatcacataggatttgcatttttaaaaaaggaaagcactaggattgttggcactggagtaactatttacactgaacagaggtttggccttttacataacatcgatacaatgcattttccaaagtctgagaaataacaaggttctgtctcgaatgcttcacagaggaggttcggatttggggacaagtgtcattaatgagggccatggaagttcgtcagcttcagagtcacatgcaatctgatcctgggcggttccccngctggggagcacttggctacggaattgaaagctaatggggaggggtggggc

SEQ ID NO: 763 - DNA, 488 bp, Homo sapiens
  modified_base (92): a, t, c, g, other or unknown
  modified_base (107): a, t, c, g, other or unknown
  modified_base (113)..(114): a, t, c, g, other or unknown
  modified_base (127): a, t, c, g, other or unknown
  modified_base (131)..(132): a, t, c, g, other or unknown
  modified_base (134): a, t, c, g, other or unknown
  modified_base (142): a, t, c, g, other or unknown
  modified_base (147): a, t, c, g, other or unknown
  modified_base (153)..(156): a, t, c, g, other or unknown
  modified_base (159): a, t, c, g, other or unknown
  modified_base (184): a, t, c, g, other or unknown
  modified_base (187): a, t, c, g, other or unknown
  modified_base (198): a, t, c, g, other or unknown
  modified_base (200): a, t, c, g, other or unknown
  modified_base (213): a, t, c, g, other or unknown
  modified_base (217): a, t, c, g, other or unknown
  modified_base (435): a, t, c, g, other or unknown
  modified_base (442): a, t, c, g, other or unknown
  modified_base (451): a, t, c, g, other or unknown
  modified_base (465): a, t, c, g, other or unknown
  modified_base (471): a, t, c, g, other or unknown
  modified_base (479): a, t, c, g, other or unknown
gattatatcatggtatatgaagcactggtgaggtctatgtcaccagaaattcccagtttgctgatttcattgagttttttaacccgatgatngtactgcaacaagtnagcatnngtcactgcaaccnaacnngngggggggnaggtncacccnnnnttnttttttgaaagggttcccattttcnaanggggaaaccgntntttttcttccctncccngttattatccagctttgtattgcaaacaatgactctcctgttgttctcattgaagcgtggggttaaagtgggagggcaacatcattccctctttgggaaatctaaggcaattctgtttgcattggggcttcaccgtgcccagaattgttatcagcatgcgaggggaccactcccccgggggaaagggcagggttataggggacaatcagtgggcccgnagggggnccatggggnccagtggcaggggnagggtnccgtggcncttggcttt

SEQ ID NO: 764 - DNA, 429 bp, Homo sapiens
  modified_base (90): a, t, c, g, other or unknown
  modified_base (380): a, t, c, g, other or unknown
  modified_base (386): a, t, c, g, other or unknown
  modified_base (403): a, t, c, g, other or unknown
agaacgagctggaccagaagaaagtaaaatatcccaaaatgacagacctcagcaagggtgtgattgaggagcccaagtagcgcctgcttngcgtgggtggatccaacaccagccctgcgttcgtgggacttgcctcagatcagcctgcgactgcaagattcttactgcagtagagaactctttttctcccttgtacttttttttgacctgggcatctttttatagggaaaaatggcctttgtaggcagtggaaaacttgcaaggaaagctgccgtctctttgggcagtctgatgcagagcctgcactctgggcacttcgctggaagaatctgggaaggttgcggtttgctcttccagtgttcgggggccttggctgcttnaagggnttcggtctaccacgganggctttgctgtttagggctgcatccc

SEQ ID NO: 765 - DNA, 600 bp, Homo sapiens
caaggtctcgatgtcgtcgggatcgacgaccttggggtcgatcgtcacgccgatcacctccccgctgcctttgacgacgaccttgaccaggcccccaccggcttgaccgtgcacctcagagttcgccagctgttgctgggcctccaggagcttttgctgcatctgctgcgcctgagcgagcagcgccgacatgtcgcctccgggttgcatgacagtcccctagcatcttggtctcgagttggtttcgcctgtggttgtcgggcgattcggaacattcagcctagaccgcgccgcgttacctttgcgccgtggacctacgagttggcccgcgtgtcgggttcgccatgatagtcggggtactcgtcgcagcagcgacgccgatcatctcgtccgcgagcgcaacccccgccaacatcgccggcatggtcgtcttcatcgaccccggacacaacggagccaacgacgcatcgatcggccgccaggtacccaccggtcgcggcggcaccaagaactgccaggccagcggaacgtcaaccaacagcggctacccggagcacaccttcacctgggaaaccgggctgcggctgcgggccgcgttga

SEQ ID NO: 766 - DNA, 399 bp, Homo sapiens
  modified_base (370): a, t, c, g, other or unknown
  modified_base (375): a, t, c, g, other or unknown
  modified_base (382): a, t, c, g, other or unknown
gagggaaaggctgctgcctcctgctctgtcctcatccccggcttagctgacggcccagagggtgggtgccaattccaccagcagctgcaactgaaaagcaaggttcagaaatgtcagatatcctccgggagctgctctgtgtctctgagaaggctgctaacattgcccgggcgtgcagacagcaggaagccctcttccagctgctgatcgaagaaaagaaagagggagaaaagaacaagaagtttgcagttgacttcaagacgctgggctgatgtactgggtacaggaagttataaaacaggaatatgggagaacaagttttccagggtttggaaaaaaatattttttgggagaaggaatccaatggagnttaantattgantggggggggaaaggttt

SEQ ID NO: 767 - DNA, 912 bp, Homo sapiens
atggcagatgatcagggctgtattgaagagcagggggttgaggattcagcaaatgaagattcagtggatgctaagccagaccggtcctcgtttgtaccgtccctcttcagtaagaagaagaaaaatgtcaccatgcgatccatcaagaccacccgggaccgagtgcctacatatcagtacaacatgaattttgaaaagctgggcaaatgcatcataataaacaacaagaactttgataaagtgacaggtatgggcgttcgaaacggaacagacaaagatgccgaggcgctcttcaagtgcttccgaagcctgggttttgacgtgattgtctataatgactgctcttgtgccaagatgcaagatctgcttaaaaaagcttctgaagaggaccatacaaatgccgcctgcttcgcctgcatcctcttaagccatggagaagaaaatgtaatttatgggaaagatggtgtcacaccaataaaggatttgacagcccactttaggggggatagatgcaaaacccttttagagaaacccaaactcttcttcattcaggcttgccgagggaccgagcttgatgatgccatccaggccgactcggggcccatcaatgacacagatgctaatcctcgatacaagatcccagtggaagctgacttcctcttcgcctattccacggttccaggctattactcgtggaggagcccaggaagaggctcctggtttgtgcaagccctctgctccatcctggaggagcacggaaaagacctggaaatcatgcagatcctcaccagggtgaatgacagagttgccaggcactttgagtctcagtctgatgacccacacttccatgagaagaagcagatcccctgtgtggtctccatgctcaccaaggaactctacttcagtcaatag

SEQ ID NO: 768 - DNA, 281 bp, Homo sapiens
  modified_base (21): a, t, c, g, other or unknown
tggtatgcaagtcagctttgnctcacagttgaaaatgttcggtcatgattgcttttgaaaccaaaggggaaggtaccgatatcattgagctatttaaagttgccagtttgggctccagtaatgctttctggtgggtaaaattccacattcaggccacgagagcatctacagtttgtactctggggctgcaggcatcctgggacgctgtacgcaattcagtggtctagtcctttataccgactcagattccttaagcatgcagagtcactcgaatgaaaaaa

SEQ ID NO: 769 - DNA, 579 bp, Homo sapiens
atgcaggccatcaagtgtgtggtggtgggagacggagctgtaggtaaaacttgcctactgatcagttacacaaccaatgcatttcctggagaatatatccctactgtctttgacaattattctgccaatgttatggtagatggaaaaccggtgaatctgggcttatgggatacagctggacaagaagattatgacagattacgccccctatcctatccgcaaacagatgtgttcttaatttgcttttcccttgtgagtcctgcatcatttgaaaatgtccgtgcaaagtggtatcctgaggtgcggcaccactgtcccaacactcccatcatcctagtgggaactaaacttgatcttagggatgataaagacacgatcgagaaactgaaggagaagaagctgactcccatcacctatccgcagggtctagccatggctaaggagattggtgctgtaaaatacctggagtgctcggcgctcacacagcgaggcctcaagacagtgtttgacgaagcgatccgagcagtcctctgcccgcctcccgtgaagaagaggaagagaaaatgcctgctgttgtaa

SEQ ID NO: 770 - DNA, 276 bp, Homo sapiens
taagttgtaaaaaaaattttgttatttataaatgaattacacaataaaataattatttttaaaagtcacaaatacaatcgttgtataaagtcattttggcatcaagtatctcttaaatatgttgcaaactattttccaaagagatgtggtccaaaccctctgaaggctttataattttgtattagataacaagtgaacaaaactgacaataaatactccaacaattattttttaaaatactaagtggcaaatgctattctaagtggcaaaacaatc

SEQ ID NO: 771 - DNA, 424 bp, Homo sapiens
aggtcccattacaaagcatggtgaaatagattatgaagcaattgtgaagctttcggatggctttaatggagcagatctgagaaatgtttgtactgaagcaggtatgttcgcaattcgtgctgatcatgattttgtagtacaggaagacttcatgaaagcagtcagaaaagtggctgattctaagaagctggagtctaaattggactacaaacctgtgtaatttactgtaagatttttgatggctgcatgacagatgttggcttattgtaaaaataaagttaaagaaaataatgtatgtattggcaatgatgtcattaaaagtatatgaataaaaatatgagtaacatcataaaaattagtaattcaacttttaagatacagaagaaatttgtatgtttgttaaagttgcatttattgcagcaag

SEQ ID NO: 772 - DNA, 572 bp, Homo sapiens
  modified_base (370): a, t, c, g, other or unknown
taatagtggttaaaaaaaactttaatttactttgttgagtcagagggttgtaaaaaaaattattgctaaagtagatatcaggcaaacagaaaggtgctttagaagtccagttaccttggagtttatttaaactaagagaaaaaagtcataatgttttcatgcaatacatacttggttctccaaataacaactgtgtgacatatagcagaaggaattaaggaatgctgcacttgtgatccatacaaaacaccaacattttaggttgtacataattagagaaatatctgaaacactttttaaaacactgtagtagccaatacatagaggcatgccgtagtgggcacaggaatgcagtttagaaaagaagaanaaaaaaaatcacataggaactactcaatttctttaaaatcactgagcaagaacagcaacattgaactttcatactgattttacacaacttctatacagtaccttgacttaaatccaagagcaaaagttaagactctcctcctctatttttggtaaacaactgcatggtaaacttagatgactcttccccctggattttacct

SEQ ID NO: 773 - DNA, 2131 bp, Homo sapiens
cctgcctcgtactcctccatttatccgccatgataagtgccagccgagctgcagcagcccgtctcgtgggcgccgcagcctcccggggccctacggccgcccgccaccaggatagctggaatggccttagtcatgaggcttttagacttgtttcaaggcgggattatgcatcagaagcaatcaagggagcagttgttggtattgatttgggtactaccaactcctgcgtggcagttatggaaggtaaacaagcaaaggtgctggagaatgccgaaggtgccagaaccaccccttcagttgtggcctttacagcagatggtgagcgacttgttggaatgccggccaagcgacaggctgtcaccaacccaaacaatacattttatgctaccaagcgtctcattggccggcgatatgatgatcctgaagtacagaaagacattaaaaatgttccctttaaaattgtccgtgcctccaatggtgatgcctgggttgaggctcatgggaaattgtattctccgagtcagattggagcatttgtgttgatgaagatgaaagagactgcagaaaattacttggggcacacagcaaaaaatgctgtgatcacagtcccagcttatttcaatgactcgcagagacaggccactaaagatgctggccagatatctggactgaatgtgcttcgggtgattaatgagcccacagctgctgctcttgcctatggtctagacaaatcagaagacaaagtcattgctgtatatgatttaggtggtggaacttttgatatttctatcctggaaattcagaaaggagtatttgaggtgaaatccacaaatggggataccttcttaggtggggaagactttgaccaggccttgctacggcacattgtgaaggagttcaagagagagacaggggttgatttgactaaagacaacatggcacttcagagggtacgggaagctgctgaaaaggctaaatgtgaactctcctcatctgtgcagactgacatcaatttgccctatcttacaatggattcttctggacccaagcatttgaatatgaagttgacccgtgctcaatttgaagggattgtcactgatctaatcagaaggactatcgctccatgccaaaaagctatgcaagatgcagaagtcagcaagagtgacataggagaagtgattcttgtgggtggcatgactaggatgcccaaggttcagcagactgtacaggatctttttggcagagccccaagtaaagctgtcaatcctgatgaggctgtggccattggagctgccattcagggaggtgtgttggccggcgatgtcacggatgtgctgctccttgatgtcactcccctgtctctgggtattgaaactctaggaggtgtctttaccaaacttattaataggaataccactattccaaccaagaagagccaggtattctctactgccgctgatggtcaaacgcaagtggaaattaaagtgtgtcagggtgaaagagagatggctggagacaacaaactccttggacagtttactttgattggaattccaccagcccctcgtggagttcctcagattgaagttacatttgacattgatgccaatgggatagtacatgtttctgctaaagataaaggcacaagacgtgagcagcagattgtaatccagtcttctggtggattaagcaaagatgatattgaaaatatggttaaaaatgcagagaaatatgctgaagaagaccggcgaaagaaggaacgagttgaagcagttaatatggctgaaggaatcattcacgacacagaaaccaagatggaagaattcaaggaccaattacctgctgatgagtgcaacaagctgaaagaagagatttccaaaatgagggagctcctggctagaaaagacagtgaaacaggagaaaatattagacaggcagcatcctctcttcagcaggcatcattgaagctgttcgaaatggcatacaaaaagatggcatctgagcgagaaggctctggaagttctggcactggggaacaaaaggaagatcaaaaggaggaaaaacagtaataatagcagaaattttgaagccagaaggacaacatatgaagcttaggagtgaagagacttcc

SEQ ID NO: 774 - DNA, 711 bp, Homo sapiens; identical to SEQ ID NO: 576
  modified_base (555): a, t, c, g, other or unknown
  modified_base (580): a, t, c, g, other or unknown
  modified_base (593): a, t, c, g, other or unknown
  modified_base (604): a, t, c, g, other or unknown
  modified_base (615): a, t, c, g, other or unknown
  modified_base (629): a, t, c, g, other or unknown
  modified_base (655): a, t, c, g, other or unknown
  modified_base (667): a, t, c, g, other or unknown
  modified_base (673): a, t, c, g, other or unknown
  modified_base (702): a, t, c, g, other or unknown

SEQ ID NO: 775 - DNA, 495 bp, Homo sapiens
gtacactggtgttggacagagcagcttggcttttcatgtgcccacctacttacctactacctgcgactttctttttccttgttctagctgactcttcatgcccctaagattttaagtacgatggtgaacgttctaatttcagaaccaattgcgagtcatgtagtgtggtagaattaaaggaggacacgagcctgcttctgttacctccaagtggtaacaggactgatgccgaaatgtcaccaggtcctttcagtcttcacagtggagaactcttggccaaaggtttttggggggaggaggaggaaaccagctttctggttaaggttaacaccagatggtgcccctcattggtgtccttttaaaaaatatttactgtagtccaataagatagcagctgtacaaaatgactaaaatagattgtaggatcatatggcgtatatcttggttcatcttcaaaatcagagactgagctttgaaactagtggtttttaatca

SEQ ID NO: 776 - DNA, 384 bp, Homo sapiens
  modified_base (8): a, t, c, g, other or unknown
tttcaaanttagtttttattttattgtaaaacattgagatggaatgatagggtttcccagaatcaggtccatattttaactaaatgaaaattatgatttatagccttctcaaatacctgccatacttgatatctcaaccagagctaattttacctctttacaaattaaataaggcaagtaactgggatccacaatttataatacctggtcaattttttctgtatttaaacctctatcataggtttaaggcctattggggggactttaatcccttaccaaataaacaggggtttaaaatcaccctcatggggggcactgccccttctgggggttttccttcctttggacttaaaccaatctgggaatggcttaggggattttccc

SEQ ID NO: 777 - DNA, 465 bp, Homo sapiens
gttacggaggcggctacggtggccagagcagcatgagtggatacgaccaagttttacaggaaaactccagtgattttcaatcaaacattgcataggtaaccaaggagcagtgaacagcagctactacagtagtggaagcccgtgcatctatgggcgtgaacggaatgggagggttgtctagcatgtccagtatgagtggtggatggggaatgtaattgatcgatcctgatcactgactcttggtcaaccttttttttttttttttttctttaagaaaacttcagtttaacacgtttctgcaatacaagcttgtgatttatgcttactctaagtcggaaatcaggattgttatgaagacttaaggcccagtatttttgaatacaatactcatctaggatgtaacagtgaagctgagtaaactataactgttaaacttaagttccagcttttctcaagttagttata

SEQ ID NO: 778 - DNA, 398 bp, Homo sapiens
gaaaactatggcatagaatggcattctgtgcgggatagcgaagggcagaaactgctcattggggttggacctgaaggaatctcaatttgtaaagatgactttagcccaattaataggatagcttatcctgtggtgcagatggccacccagtcaggaaagaatgtatatttgacggtcaccaaggaatctgggaacagcatcgtgctcttgtttaaaatgatcagcaccagggcggccagcgggctctaccgagcgataacagagacgcacgcattctacaggtgtgacacagtgaccagcgccgtgatgatgcagtatagccgtgacttgaagggcacttggcatctctgtttctgaatgaaaacattaaccttggcaagaaatatgtctttgatatt

SEQ ID NO: 779 - DNA, 2494 bp, Homo sapiens
gtgcgcggaggggacgagcggctggaccacagccggcgcccgatcaggatctccgcgctgggatcggtggaacttgaggcagcggcggcgcggggcgccatggcacaccgagcggctccgtcttctgctcctcagagagcccggctggcggcctgggatgacaagatgtctggactgcaatcctgcacagttttgagagggagatgacttgagtggttggcttttatctccacaacaatgtccatgaacaattccaaacagctagtgtctcctgcagctgcgcttctttcaaacacaacctgccagacggaaaaccggctttccgtatttttttcagtaatcttcatgacagtgggaatcttgtcaaacagccttgccatcgccattctcatgaaggcatatcagagatttagacagaagtccaaggcatcgtttctgcttttggccagcggcctggtaatcactgatttctttggccatctcatcaatggagccatagcagtatttgtatatgcttctgataaagaatggatccgctttgaccaatcaaatgtcctttgcagtatttttggtatctgcatggtgttttctggtctgtgcccacttcttctaggcagtgtgatggccattgagcggtgtattggagtcacaaaaccaatatttcattctacgaaaattacatccaaacatgtgaaaatgatgttaagtggtgtgtgcttgtttgctgttttcatagctttgctgcccatccttggacatcgagactataaaattcaggcgtcgaggacctggtgtttctacaacacagaagacatcaaagactgggaagatagattttatcttctacttttttcttttctggggctcttagcccttggtgtttcattgttgtgcaatgcaatcacaggaattacacttttaagagttaaatttaaaagtcagcagcacagacaaggcagatctcatcatttggaaatggtaatccagctcctggcgataatgtgtgtctcctgtatttgttggagcccatttctggttacaatggccaacattggaataaatggaaatcattctctggaaacctgtgaaacaacactttttgctctccgaatggcaacatggaatcaaatcttagatccttgggtatatattcttctacgaaaggctgtccttaagaatctctataagcttgccagtcaatgctgtggagtgcatgtcatcagcttacatatttgggagcttagttccattaaaaattccttaaaggttgctgctatttctgagtcaccagttgcagagaaatcagcaagcacctagcttaataggacagtaaatctgtgtggggctagaacaaaaattaagacatgtttggcaatatttcagttagttaaatacctgtagcctaactggaaaattcaggcttcatcatgtagtttgaagatactattgtcagattcaggttttgaaatttgtcaaataaacaggataactgtacattttcaacttgtttttgccaatgggaggtagacacaataaaataatgccatgggagtcacactgaaagcaattttgagcttatctgtcttatttatgctttgagtgaatcatctgttgaggtctaatgcctctacttggcctatttgccagagaacatcttaatgcagcctgcatagtgaaatggttattttgagatcaccgctctgtagctaacccttataaactaggctcagtaaaataaagcactcttattttttgatctggcctattttgcccctcattgtgtagcctcaattaacacatgcatggtcatgacacccagaattcatgatggtttgttataacaacctctgcatattccaggtctggcagacaggttgcctgaccctgcaatcctatctagaatgggcccattcttgtcacatttgacaaataggactgcctacatttattattatgaaggtcgattgttgttggaagtgttttttcatgtcatagattagcaattttcaaataattattttttctctgaaaattttgtgtgtgattgcacaataaataatttttagagaaacaaaggctctttctcagcacattgatgggcaactagaattacagcagtttcaaactctaccatggataatgcaaacaaaccgaagctacatgccaatgataggtgcaaagaatattggcaaaaggtgctttaccttgagccattatttgtgtcagagaacaaaagaaacagaatcaatatataaattcaaagactatctgcagctagtgtgtttcttctttacacacatatacacacagacatcagaaaattctgttgagagcaggttcattaaatttgtaagatggcatattctaaagcctgtgctaccagtactaagaggggaagactggcaatttgccaagcacttggggattattataacaattaactaggagatcaagagataataatctctccccaaattttccaataataattgag

SEQ ID NO: 780 - DNA, 287 bp, Homo sapiens
  modified_base (259): a, t, c, g, other or unknown
gacaatttaattgcaaaagacacagaatattaaggcataacaaagtaaactgaaatgaagtttagttatcaatattcatctctgagaaagttgtgaatcagttcctttagataacatgtggctcaggttgatttaataatggggctggggtgtctgcatctctatgctgcttttccagcactgtactgcctgtagtggaaaagactcttggagtccaccttgcgagatttctgcacagcttcagccaaaaagtttgggncaccccgaaaattaggtgagggagaggg

SEQ ID NO: 781 - DNA, 895 bp, Homo sapiens
agagacttaagtctaaggcactgagcgtatcatgttaaagatgagcgggtggcagcgacagagccaaaatcagagctggaacctgaggagagagtgttcaagaaggaagtgtatcttcatacatcaccacacctgaaagcagatgtgcttttccagactgatccaactgcagagatggcagctgagtcattgcctttctcttcggacactgtcagctgggagctggaagcctggtatgaggacctgcaagaggtcctgtcttcagatgaaaatgggggtacctatgtttcacctcctggaaatgaagaggaagaatcaaaaatcttcaccactcttgaccctgcttctctggcttggctgactgaggaggagccagaaccagcagaggtcacaagcacctcccagagccctcactctccagattccagtcagagctccctggctcaggaggaagaggaggaagaccaagggagaaccaggaaacggaaacagagtggtcattccccagcccgggctggaaagcagcgcatgaaggagaaagaacaggagaatgaaaggaaagtggcacagctagctgaagagaatgaacggctcaagcaggaaatcgagcgcctgaccagggaagtagaggcgactcgccgagctctgattgaccgaatggtgaatctgcaccaagcatgaacaattgggagcatcagtcccccacttgggccacactacccacctttcccagaagtggctactgactaccctctcactagtgccaatgatgtgaccctcaatcccacatacgcagggggaaggcttggagtagacaaaaggaaaggtctcagcttgtatatagagattgtacatttatttattactgtccctatctattaaagtgactttctat

SEQ ID NO: 782 - DNA, 352 bp, Homo sapiens; identical to SEQ ID NO: 467
  modified_base (11)..(12): a, t, c, g, other or unknown
  modified_base (14): a, t, c, g, other or unknown
  modified_base (218): a, t, c, g, other or unknown
  modified_base (264): a, t, c, g, other or unknown
  modified_base (296): a, t, c, g, other or unknown
  modified_base (314): a, t, c, g, other or unknown
  modified_base (323): a, t, c, g, other or unknown
  modified_base (330): a, t, c, g, other or unknown
  modified_base (345): a, t, c, g, other or unknown

SEQ ID NO: 783 - DNA, 388 bp, Homo sapiens
ttttttgtagtgcctgcagccctcatgggtcgggatggaggcagaaaatcagttcctgtttatttacaaaaatatatatatgtgtatgtatgtatatatattaacccctcagctccctcccatgatcatccttttacttctacccccacctcccttttaaaacaaagaggttttctggggtgcagagagggttctcctgaaagtgggcagaagcagcaccgatagcctagtctggcaggttgtgggaaggggcgcagggagtgaccatgagcgaccttggccccgtccttgctccttgcaccctgattggggcatggggtgagaggagggatcagtccttgaatccctgaatactgcaaagaatgcgcttctggtgcccgggcagtgt

SEQ ID NO: 784 - DNA, 357 bp, Homo sapiens
  modified_base (24): a, t, c, g, other or unknown
  modified_base (58): a, t, c, g, other or unknown
  modified_base (63): a, t, c, g, other or unknown
  modified_base (229): a, t, c, g, other or unknown
  modified_base (305): a, t, c, g, other or unknown
  modified_base (354): a, t, c, g, other or unknown
gattcggaacgagggatgggaganggcgccggtgttgcccctggtgctgcccctgcancccgnatccgcctggcacaagggctctggctcctctcctggctgctggcgctggctggtggcgtcatcctcctctgtagtgggcacctcctggtccagctaaggcaccttggcaccttcctggctccctcctgtcagttccctgtcctgccccaggctgccctggcacggngcgcggttggctctgggcacaggactagtgggtgtaggagccagccgggcaagtctgaatgcagctctataccctncctgggcgaggggtcctggggcccgcttgctggtggctggcacggcttngtt

SEQ ID NO: 785 - DNA, 418 bp, Homo sapiens
agagagtatattgctgcttttctcagtcactttggcacaggtgtcgtggaatatgatgcagaaggctttacaaaactcactctgctgctgatgtggaaagatttttgttttcttgtacacattgacctgcctctgtttttccctcgagaccagccaactctcacatttcagtccgtttatcactttaccaacagtggacagctttactcccaggcccaaaaaaattatccgtacagccccagatgggatggaaatgaaatggccaaaagagcaaaggcttatttcaaaacctttgtccctcagttccaggaggcagcatttgccaatggaaagctctaggaaacaccagtcttgagaggtggccagccagactgcctgtccacatgcgtgtcagcacatacagccgcttcctggaagc

SEQ ID NO: 786 - DNA, 5554 bp, Homo sapiens
  modified_base (2790): a, t, c, g, other or unknown
  modified_base (2861): a, t, c, g, other or unknown
  modified_base (2890): a, t, c, g, other or unknown
  modified_base (3009): a, t, c, g, other or unknown
  modified_base (3018): a, t, c, g, other or unknown
  modified_base (3841): a, t, c, g, other or unknown
  modified_base (3878): a, t, c, g, other or unknown
gaattccgatctctcgtcctcttcctgggctaggccgccccaggcgcggcccctgcgactcctggcacggccccgtgctcggctgccgccctggcgcgcgccacactgtcgtccccggacgggcgcggaccggctcggccggggcgccggcggctggggaggggtcgctggccccggggccgcgcatgcgccgccaccaacttggggctgtcagtggagggcgagtgctggttctcaggggaggcgacgccttcgggccaacgggcctcgagccgaggcagcagtgggaacgactcatcctttttccagccctggggcgtggctggggtcggggtcggggtcggggccggtgggggccccgcccccgtctcctggcctgcccccttcatgggccgcgatgatggcggccctgtacccgagcacggacctctcgggcgcctcctcctcctccctgccttcctctccatcctcttcctcgccgaacgaggtgatggcgctgaaggatgtgcgggaggtgaaggaggagaatacgctgaatgagaagcttttcttgctggcgtgcgacaagggtgactattatatggttaaaaagattttggaggaaaacagttcaggtgacttgaacataaattgcgtagatgtgcttgggagaaatgctgttaccataactattgaaaacgaaaacttggatatactgcagcttcttttggactacggttgtcagaaactaatggaacgaattcagaatcctgagtattcaacaactatggatgttgcacctgtcattttagctgctcatcgtaacaactatgaaattcttacaatgctcttaaaacaggatgtatctctacccaagccccatgcagttggctgtgaatgcacattgtgttctgcaaaaaacaaaaaggatagcctccggcattccaggtttcgtcttgatatatatcgatgtttggccagtccagctctaataatgttaacagaggaggatccaattctgagagcatttgaacttagtgctgatttaaaagaactaagtcttgtggaggtggaattcaggaatgattatgaggaactagcccggcaatgtaaaatgtttgctaaggatttacttgcacaagcccggaattctcgtgaattggaagttattctaaaccatacgtctagtgacgagcctcttgacaaacggggattattagaagaaagaatgaatttaagtcgtctaaaacttgctatcaaatataaccagaaagagtttgtctcccagtctaactgccagcagttcctgaacactgtttggtttggacagatgtcgggttaccgacgcaagcccacctgtaagaagataatgactgttttgacagtaggcatcttttggccagttttgtcactttgttatttgatagctcccaaatctcagtttggcagaatcattcacacaccttttatgaaatttatcattcatggagcatcatatttcacatttctgctgttgcttaatctatactctcttgtttacaatgaggataagaaaaacacaatggggccagcccttgaaagaatagactatcttcttattctgtggattattgggatgatttggtcagacattaaaagactctggtatgaagggttggaagactttttagaagaatctcgtaatcaactcagttttgtcatgaattctctttatttggcaacctttgccctcaaagtggttgctcacaacaagtttcatgattttgctgatcggaaggattgggatgcattccatcctacactggtggcagaagggctttttgcatttgcaaatgttctaagttatcttcgtctcttttttatgtatacaaccagctctatcttgggtccattacagatttcaatgggacagatgttacaagattttggaaaatttcttgggatgtttcttcttgttttgttttctttcacaattggactgacacaactgtatgataaaggatatacttcaaaggagcagaaggactgtgtaggcatcttctgtgaacagcaaagcaatgataccttccattcgttcattggcacctgctttgctttgttctggtatattttctccttagcgcatgtggcaatctttgtcacaagatttagctatggagaagaactgcagtcctttgtgggagctgtcattgttggtacatacaatgtcgtggttgtgattgtgcttaccaaactgctggtggcaatgcttcataaaagctttcagttgatagcaaatcatgaagacaaagaatggaagtttgctcgagcaaaattatggcttagctactttgatgacaaatgtacgttacctccacctttcaacatcattccctcaccaaagactatctgctatatgattagtagcctcagtaagtggatttgctctcatacatcaaaaggcaaggtcaaacggcaaaacagtttaaaggaatggaggaatttgaaacagaagagagatgaaaactatcaaaaagtgatgtgctgcctagtgcatcgttacttgacttccatgagacagaagatgcaaagtacagatcaggcaactgtggaaaatctaaacgaactgcgccaagatctgtcaaaattccgaaatgaaataagggatttacttggctttcggacttctaaatatgctatgttttatccaagaaattaaccattttctaaatcatggagcgaataattttcaataacagatccaaaagactatattgcataacttgcaatgaaattaatgagatatatattgaaataaagaattatgtaaangccattctttaaaatatttatagcataaatatatgttatgtaaagtgtgtatatagaattagttttttaanccttctgttagtggctttttgcagaagcnaaacagattaagtagatagattttgttagcatgctgcttggttttcttacttagtgctttaaaatgtttttttttatgtttaagaggggcagttataaatggacacattgcccagaatnttttgtaanatgaagaccagcaaatgtaggctgatctccttcacaggatacacttgaaatatagaagttatgttttaaatatctctgttttaggagttcacatatagttcagcatttattgtttaggagtataattttattttatctaaaataatagtctattttttcttttgtattttgttataatcttaagcaacaaagaaaaaaccctaatatttgaatctatttatgtctttcaatttaaattcacttcagtttttgttattgtaatatatttacttttacatggttataatcactttatatttttaatgtttttttcacttaatattttatatatacatttccatgtattgatgtagttagtccacatttaaatttttatagaattatatagtttttgaaaaatacagtcagtagatgttttattttttagctattcagttatgtttataagtttgcatagctacttctcgacatttggtttgttttaatttttttgtatcataatagtcctatttttttttcaagttggagtgaatgtttttagttttaagatagataggagacacttttttatcacatgtagtcacaacctgttttgtttttgtaaaacataggaagtctctttaatgcaatgatttgttttatatttggactaaggttcttgagcttatctcccaaggtactttccataatttaacacagcttctataaaagtgacttcatgcttacttgtggatcattcttgctgcttaagatgaaaagcattggttttttaaaattagagaataaaatatgtatttaaatttttggtgtgttcacataaagngatgtagctaaaatgttttcataggctattatatatnctcgcagcatttccagttaagaggatattaggtatataattctcttcttaaccgaatgtcagatggtcttacgccacagggtgcaggtaacccttggcctgtaagcaccaccgatccagggatcattgtctaaataggttactattgtttgtttcatctggaattccgagggtgcacaaattaccagcagcctgagggaggtcttattggaaggcttcctgcaggaggtggcatctgatccgggcctagacatgggagttggaattttccagacagggaagggcactgtgggtggaaaacaaagcacgaacaaacgtatggtgtgggaccaagcctcacatggtgcataaatgatcagaggtgaggctgaagcctaggtgtgtgtcaggggaagagctagaaaggaaggtggggcagggaagctcagtgagtgtctgctacatgtgaggcttcattctgagcaccaactctgcgcgctaatgccacgaagtggagtcatgattcttccattttccaggtgaagaaaccaaagcacggggagaattagcttgtccaagggctcatggccagtcggtggtgccactgggatttaaccagggattccagctgtggaagctgcatgctgccagctgagcactccgtctgtccaccctggcaaatgacatgctgagggctgggggcagtcatctttccagcagttgtcgaccagaaataatgataatgcatcagccaggtgggcaagaactcagactttgtggtcagacctcgctgtggcagggagcttagaaaagtcacttttcctccacagctgtgtaacatggggaaagggggatgctcagctcacctctcatggcccttgtgtggggatttcaagggtaaatgctggaaaagcactgaatatacagcacttagtagaggctttgcaagcggctgtcctcacccaaacggatccttccccaggaaagctctgcaaatggagccacttggctttttgcctgatgccatattccgttgtttaaaacggcgatcccaaacttaagagtatgaaaggggtgttttgcagacaatgcataattaaccacttctaaacacagggtgtgccaggctccctcaaagctgttaattattcttcattagtgatcttaagttaatgtaaaataatcctggagctctgccagaggctcgggcaggggaaggagcagagccgcttatttcaactagcaaacggaaagaaatcttcacggggcgcctctgcgttctgccttggttgtggggagatgcctctatagactctttagctctgcccaaaggccattgtgggaggcggcaagccctctcccaagttcccagagcccagccgacctcagggtactttggttaatgaaatagttcaggtgggaagaaaatatggaggagagtagtatacccatcgcccagcttccaaaataagctgttaatggtgtggtggactgcccctgtgggccaccccacaaatcttatccctttcctgcttccccagagctaagcctaaacagtccctcttgtttggtgtgtagatttcccatgcacatttttttaaattgctgtaggtacatagtaagtgtatatatttatggggtacgtgagatgttttgacacaggcacgcaatgtgaaatacacacttcatggagaattc

SEQ ID NO: 787 - DNA, 2400 bp, Homo sapiens
agctcgcccgcagctcgcactcgcaggcgacctgctccagtctccaaagccgatggcatctccgggctctggcttttggtctttcgggtcggaagatggctctggggattccgagaatcccggcacagcgcgagcctggtgccaagtggctcagaagttcacgggcggcatcggaaacaaactgtgcgccctgctctacggagacgccgagaagccggcggagagcggcgggagccaacccccgcgggccgccgcccggaaggccgcctgcgcctgcgaccagaagccctgcagctgctccaaagtggatgtcaactacgcgtttctccatgcaacagacctgctgccggcgtgtgatggagaaaggcccactttggcgtttctgcaagatgttatgaacattttacttcagtatgtggtgaaaagtttcgatagatcaaccaaagtgattgatttccattatcctaatgagcttctccaagaatataattgggaattggcagaccaaccacaaaatttggaggaaattttgatgcattgccaaacaactctaaaatatgcaattaaaacagggcatcctagatacttcaatcaactttctactggtttggatatggttggattagcagcagactggctgacatcaacagcaaatactaacatgttcacctatgaaattgctccagtatttgtgcttttggaatatgtcacactaaagaaaatgagagaaatcattggctggccagggggctctggcgatgggatattttctcccggtggcgccatatctaacatgtatgccatgatgatcgcacgctttaagatgttcccagaagtcaaggagaaaggaatggctgctcttcccaggctcattgccttcacgtctgaacatagtcatttttctctcaagaagggagctgcagccttagggattggaacagacagcgtgattctgattaaatgtgatgagagagggaaaatgattccatctgatcttgaaagaaggattcttgaagccaaacagaaagggtttgttcctttcctcgtgagtgccacagctggaaccaccgtgtacggagcatttgaccccctcttagctgtcgctgacatttgcaaaaagtataagatctggatgcatgtggatgcagcttggggtgggggattactgatgtcccgaaaacacaagtggaaactgagtggcgtggagagggccaactctgtgacgtggaatccacacaagatgatgggagtccctttgcagtgctctgctctcctggttagagaagagggattgatgcagaattgcaaccaaatgcatgcctcctacctctttcagcaagataaacattatgacctgtcctatgacactggagacaaggccttacagtgcggacgccacgttgatgtttttaaactatggctgatgtggagggcaaaggggactaccgggtttgaagcgcatgttgataaatgtttggagttggcagagtatttatacaacatcataaaaaaccgagaaggatatgagatggtgtttgatgggaagcctcagcacacaaatgtctgcttctggtacattcctccaagcttgcgtactctggaagacaatgaagagagaatgagtcgcctctcgaaggtggctccagtgattaaagccagaatgatggagtatggaaccacaatggtcagctaccaacccttgggagacaaggtcaatttcttccgcatggtcatctcaaacccagcggcaactcaccaagacattgacttcctgattgaagaaatagaacgccttggacaagatttataataaccttgctcaccaagctgttccacttctctaggtagacaattaagttgtcacaaactgtgtgaatgtatttgtagtttgttccaaagtaaatctatttctatattgtggtgtcaaagtagagtttaaaaattaaacaaaaaagacattgctccttttaaaagtcctttcttaagtttagaatacctctctaagaattcgtgacaaaaggctatgttctaatcaataaggaaaagcttaaaattgttataaatacttcccttacttttaatatagtgtgcaaagcaaactttattttcacttcagactagtaggactgaatagtgccaaattgcccctgaatcataaaaggttctttggggtgcagtaaaaaggacaaagtaaatataaaatatatgttgacaataaaaactcttgcctttttcatagtattagaaaaaaatttctaatttacctatagcaacatttcaaatgtatttaaatacatataattttacaaaaggaaaatatatatattaaaaaagatatcctattttgtaacatatagatttttattttatataggttatacaaactgcgggggcggaatt

SEQ ID NO: 788 - DNA, 362 bp, Homo sapiens
tttttttttacagtttatcttttattttctgcaaatttaggaacatatttactcgttttcacattgaatcttaagtttaagctcttcatttggtatttaggcaatatatgagaaaaaaattttttttgttcatttgtaattttaacaagttgaacattttaccatgattgaacatgtttttattacagtatttaacattcccccaaagaataccctgcaaagtgtaaacctttgtcccatactgtgatattactgttctgctacaataaatgtcaaacctaagcactttgcagttcactacttttgggaaaatgttctagggaactgtatcacaggtgaaactgttacccataaagtgtagc

SEQ ID NO: 789 - DNA, 396 bp, Homo sapiens
  modified_base (235): a, t, c, g, other or unknown
  modified_base (329): a, t, c, g, other or unknown
  modified_base (352): a, t, c, g, other or unknown
  modified_base (358): a, t, c, g, other or unknown
  modified_base (372): a, t, c, g, other or unknown
attcggcacaggatgagcagaagaggttatcagcattaaattgttttggttctaaatttggaacagtatatataattaaaagtaaggaacattagaggatttaattagaataaatacatgttttggaaatacagtgacctcttgcagtgtcacaaaagtgcaaagtgatattagctgtcatctgcaatacagaatctcattgcttttgcacatggagcatatagggaaactccanacagatcacaatgagggtttctaaatctgttggggttctgtcttctattggggttctgtgaaggcaaaccactgtaggctttagctggggttcngtcctatggactcgttggggggnatgccntgggtttttccatncttacctggcagtcttgggggggt

SEQ ID NO: 790 - DNA, 487 bp, Homo sapiens
  modified_base (21): a, t, c, g, other or unknown
  modified_base (236): a, t, c, g, other or unknown
  modified_base (283): a, t, c, g, other or unknown
  modified_base (331): a, t, c, g, other or unknown
  modified_base (392): a, t, c, g, other or unknown
  modified_base (463): a, t, c, g, other or unknown
  modified_base (477): a, t, c, g, other or unknown
  modified_base (487): a, t, c, g, other or unknown
ttttgcttctctgcccctttncatttcttttgtatttgttttctgtgagagcactgaaatggcagccctggaatctacaatttggctctccactgagcaccttatcttgccaccttagccttaagaatgaatatgaagaaaaatacacagccacctctgtccagggcagtaagaagggctgcaaggaaggggaggatggggacaaggaaaggatcagatacctgctccagtagttntgaggccactgtgtctcaggggactccagggaggagcagaagagggntcccacgaagttattcttacgcagctggggccagggagggtcagagtnggtgccagggtgcaagttaggctaaagaagccaccacttattcctctctcttgcccatttntgggggggcaaaggccatttggtcacccaagagtctttccagggggacccacagatattgccatgtccctncacacgtctttggngtccttaacn

SEQ ID NO: 791 - DNA, 415 bp, Homo sapiens
catatttatcgggatgacaaatccatagaatatattcttttatgttaaattatgatcttcatattaatcttaaaattttgtgacgtgtctttttcctttttttccacagttttaatatattattcttcaacgacattttttgtaactttacacttttttggttattttattttaaaaaaatgaaaaattaatttaaaaaaatgcaaaaaactgttggattatttattttagaaattcccccctgttgtgttggactgcaaattgagtttctttctctttaggcctttcacaactaggactgagaatgtatgtaaaagttctgtgacagtacagaaggaaaacaactttttatgtatagcttctaaaaggggaaaaaaaaaaaaagagaaaccctttgacttccacgtgcccatct

SEQ ID NO: 792 - DNA, 450 bp, Homo sapiens
ttagtgaaacattttctttttattgagaacatctcaaatcctttgtctgtatttgacagcgtctcatgctcagttccagctggtcttgtgcgagaggaagctcatgcagttgtaacgtgtggtgtatacacagatttacatacagagaacactgaggattgcatctcagcaacatgtttctcagccgaattacattcatagaaagtgtccagattctaaaatcaaattaaaagcatgtaatccaaagcctgaaaaagcaaacagctttaggggctgactccattagcgttccatagactgtgcttttaaccgttcagttcatgtttaatggcccatcggttccttacataccatcagcttatgctgtggccaaaagaagtgttcttgtggcttggtactcgtcccttcaaacagtaaacaagaaagtgcagacagtgctgccagagacag

SEQ ID NO: 793 - DNA, 405 bp, Homo sapiens
  modified_base (43): a, t, c, g, other or unknown
  modified_base (389): a, t, c, g, other or unknown
ccagtttacactgaagatcgatctgaaactcagcaccagcganaatccagaactttgcctgtctccatggctggttttaatttccccattctgcagtggcttgttaatattagttctgacctttggggcaaggtgaacacatggttggactgaagagaaaaggcttctggtggctcaggaacgtctttggcaactacaacagctgatatttcaacagagcacatacatcccccacttaacaagggtacgtcctcagccttctcagggaaccaacgaacacctccaggcttcctctttgatgccacccactggacctgccttgggggtctgtaaatgcaagaggaaccgagtgttggataattagcgatgggaagaaaaaacctcttagnattaaaaggtaggttt

SEQ ID NO: 794 - DNA, 417 bp, Homo sapiens
  modified_base (338): a, t, c, g, other or unknown
  modified_base (352): a, t, c, g, other or unknown
  modified_base (357): a, t, c, g, other or unknown
  modified_base (378): a, t, c, g, other or unknown
  modified_base (390): a, t, c, g, other or unknown
tccagagagtaagatcagattcgtccacaaagagatgggcataataccaagctggggtggcaccaccggctagttgaaataatcggaagtagacaagctctcaaagtgttgagtggggcccttaaactggattcaaaaaatgctctaaacataggaatggttgaagaggtcttgcagtcttcagatgaaactaaatctctagaagaggcacaagaatggctaaagcaattcatccaagggccaccggaagtaattagagctttgaaaaaatctgtttgttcaggcagagagctatatttggggggaagcattacagaacgaaagagatcttttagggnacagttttggggtnggccngcaaattttagaggctatttnctaaggaagggnattttattaatatttgggtttttcccg

SEQ ID NO: 795 - DNA, 448 bp, Homo sapiens
  modified_base (8): a, t, c, g, other or unknown
  modified_base (52): a, t, c, g, other or unknown
  modified_base (55): a, t, c, g, other or unknown
  modified_base (59): a, t, c, g, other or unknown
  modified_base (62): a, t, c, g, other or unknown
  modified_base (187): a, t, c, g, other or unknown
  modified_base (237): a, t, c, g, other or unknown
  modified_base (244): a, t, c, g, other or unknown
  modified_base (297): a, t, c, g, other or unknown
  modified_base (314): a, t, c, g, other or unknown
  modified_base (324): a, t, c, g, other or unknown
  modified_base (387): a, t, c, g, other or unknown
  modified_base (441): a, t, c, g, other or unknown
agcaggancaagtttaataaacgtttattgagcagtagaatacaagtgagtnccngganccngatcaccaagtcctgtacaactgaggtaattatttcacaatgatgggtggctcagtgagattctgattgcatgcgctgcatgacaaattatctactcagagtatgcctgacacgccggagggctngagggggaacacactgaaagcagtaccagggagcagtgcatctcacaganccatttnttcatgccatgaagtaaacggtacttatacaagtgtacagtgacgttccacgntccccatctaacacggnttgctggaantttacaggcagactgacgttttctttcacatgtactccaagtaaatctggttagtgatgaccngggggcaggcgctgaagcttttcaaagccttacttcttttatcagcagcccggntttttat

SEQ ID NO: 796 - DNA, 203 bp, Homo sapiens
gaaaggaagctgggcgtcctctgggccccccaacacacgtcccatttagccctgcacagcggtctccttcccctaagccagcaccgctgctccctggacccgggaaggaggctgcctggctggaggccgagcgatgggcctgtgctgaggatttgtgctgtgatttgggcaaatcattccaggtctttgggcctccaccccct

SEQ ID NO: 797 - DNA, 441 bp, Homo sapiens
catctataggttttttttattagaaaagaaattaagtgttgtcactagagattgaaggaaattaacaatcttacaattctagaacaggcaaacttcatgataagggattcttaagttttcaaagtgtaggagctctttcacagatacactcttggtgtagggggctgtaagttttatcagatgttttacatttcatgctttaatctttgctggtagtctaaataaaataaatacacagtgttcaggattatctggatagccatcttaaataacagagtgttccacatgaccacagcctctgcacttgtgcctctgatccatatgacaccaagaccaactatgcttttcatatgatttctccacattgggtcttgtgacttttcacagaattgttgaacatttccccagagatccgtggttacagagagctccaatctgctt

SEQ ID NO: 798 - DNA, 484 bp, Homo sapiens
  modified_base (12): a, t, c, g, other or unknown
  modified_base (34): a, t, c, g, other or unknown
  modified_base (391): a, t, c, g, other or unknown
  modified_base (418): a, t, c, g, other or unknown
  modified_base (474): a, t, c, g, other or unknown
tggagcccctgntgcggagatggcctccagaggncagctgcagggcacgttctgggcttagcgacagaggcaagcaagggactggtgtctctggtgagaggtgggtttgatgtatctctgtcctatgctggtctctcttctcctttataaaatcctctgtggtcaactgactactgcgtatcgcagtgggaataagactgcacagttgctggtaggtgagtttaaagtcttaatctatgcattcagagaaatatttttatatgctttgtgtaatttataacaaggattttttttttagctttgttaactgtgaattcacccctcctcctccactgcatatttaaagcatgtgttcacactgtgtgtaaacattcactggaagattttttcnttgtgcattgctgactgttccaacatnacaagtattattaaaattaaatattaactggaccggaaaaaaagaaaaaaaaaagntccttacccg

SEQ ID NO: 799 - DNA, 360 bp, Homo sapiens
gcggaatgggaagcagtttatggagttaagtggggctctgctatttcccccaagaaggactcggaagatgttgattccagggcagagtgaggggcagacgggatgaggctcttctgtaaagtccaacagacgctcacagatgctgggaggctggggactgccaggttgggagcctcacccagagagcctcactgcattgaccccacacccaccactcacccagcacacagggggcctctcctcacgctcccaggccaccaggatggcccccaggttcacacacaggcacacgcacacacgctgcactcaccacgcactgaagggcatcacagccccaagtctgggtaagaaattctccac

SEQ ID NO: 800 - DNA, 406 bp, Homo sapiens
  modified_base (73)..(74): a, t, c, g, other or unknown
  modified_base (152): a, t, c, g, other or unknown
  modified_base (163): a, t, c, g, other or unknown
  modified_base (188): a, t, c, g, other or unknown
  modified_base (199): a, t, c, g, other or unknown
  modified_base (294): a, t, c, g, other or unknown
  modified_base (322): a, t, c, g, other or unknown
  modified_base (336): a, t, c, g, other or unknown
  modified_base (401): a, t, c, g, other or unknown
gttgcatcattatacatcacactgagtaagaatcgtttagccatctacattcaatgttactgggtaatatttnnctcaaattataattcccaacactgattttacctgtgacaaaaggaacaatagtaattccttgaagaagactaactggnaaaaacatttngcttttagtataaaagttcctaggntgctgaaaggnacacatacacacctaaagagtcatggccttcttaaacagctttcttaatcctttctgggaaatatcctttggttcatttttattgcccctctctngggcaaaacaaagtatgttaacgcaggnatcagtgagttatntcctaggcacttgtaaggcaatatccttaccaagagggaccattcaacttttgtaataatccgtnaagcg

SEQ ID NO: 801 - DNA, 463 bp, Homo sapiens
  modified_base (63): a, t, c, g, other or unknown
  modified_base (117): a, t, c, g, other or unknown
  modified_base (152): a, t, c, g, other or unknown
  modified_base (232): a, t, c, g, other or unknown
gcgaccgccgagcgacagatccagaacggcctggcctgcagcggtgcctgacgcgaacggcancccgggctctcccgctcattcccatcgtggtggagcagacgggtcgcggcgagncgcctgatgacatctactcgcggctgctgcgggangcactcagtgtgcgtcatgggcccgatcgatgacagcgttgccagccttgttatcgcacagctcctcttcctgcaatccngagagcaacaagaagcccatccacatgtacatcaacagccctggtggtgtggtgaccgcgggcctggcatctacgacacgatgcagtacatcctcaacccgatctgcacctggtgcgttgggccaggccgccagcatgggctcccttgcttctcgccgccggaaccccaggcatgcgccactcgctccccaactcccgtatcatgatccaccagccctcaggaggcgcccg

SEQ ID NO: 802 - DNA, 537 bp, Homo sapiens
attcggcaatggagaggatagggagaatatttactaactaaataccattcactactcatgcgtgagactgggtgtacaaactcatcctcttttaatggcatttctctttaaactatgttcctaacaaaatgagatgataggatagatcctggttaccactcttttgctgtgcacatacgggctctgactggttttaatagtcaccttcatgattatagcaactaatgtttgaacaaagctcaaagtatgcaatgcttcattattcaagaatgaaaaatataatgttgataatatatattaagtgtgccaaatcagtttgactactctctgttttagtgtttatgtttaaaagaaatatattttttgttattattagataatatttttgtatttctctattttcataatcagtaatagtgtcatataaactcatttatctcctcttcatggcatcttcaatatgaatctataagtagtaaatcagaaagtaacaatctatggcttatttctatgacaaattcaagagctagaaaaata

SEQ ID NO: 803 - DNA, 472 bp, Homo sapiens
tctggacagtggttttattggtaaagatataagacatattggctctattaaaaactcaggtaataaagcactaagcttgatttttgtattgctacagtctctttcttctaaggggaagaaaatctccccaagaataggatgctacctgaggaattatgccgaataaagaaaaggaatggatggtcggcagtgaaattttcttcgggcatcaacatgcagaaagttgcgatgcctgctgtggcagctgccgcctctgttccctcttcattcacttccacaaatgacttgtggacaatttttgatataaaaatatctctggctcctgacatgccagacagatcagccttgctactgttaaagagatcctgcacacctaggcgggcgaggtcggagttgagagtgtaactctcttccagtttgaacctgggcaagctgacattaacttcaatgaaatcgagattctcaggtttag

SEQ ID NO: 804 - DNA, 66 bp, Homo sapiens
tctagtcgacggccagtgaattgtaatacgactcactatagggcgttttttttttttttttttttt

SEQ ID NO: 805 - DNA, 260 bp, Homo sapiens
gtgctgagtggcggcactctacatcgagatcccgggcggcggctgcccgaggggagcaaggacagctttgcagttctcctggagttcgctgaggagcagctgcgagccgaccatgtcttcatttgcttccacaagaaccgcgatgacagagccgccttgctccgaaccttcagctttttgggctttgagattgtgagaccggggcatccccttgtccccaagagacccgacgcttgcttcatggcctacacgttcgagag
